(19) United States
(12) Patent Application Publication
(10) Pub. No.: US 2023/0416810 A1
(43) Pub. Date: Dec. 28, 2023

(54) COMPOSITIONS AND METHODS FOR IMMUNE REPERTOIRE MONITORING

(71) Applicant: Life Technologies Corporation, Carlsbad, CA (US)

(72) Inventors: Geoffrey Lowman, Carlsbad, CA (US); Chenchen Yang, Foster City, CA (US); Timothy Looney, Austin, TX (US)

(73) Assignee: Life Technologies Corporation, Carlsbad, CA (US)

(21) Appl. No.: 18/317,484

(22) Filed: May 15, 2023

Related U.S. Application Data
(63) Continuation of application No. PCT/US2021/072434, filed on Nov. 16, 2021.
(60) Provisional application No. 63/203,337, filed on Jul. 17, 2021.
(60) Provisional application No. 63/201,048, filed on Apr. 9, 2021.
(60) Provisional application No. 63/198,843, filed on Nov. 16, 2020.

(51) Int. Cl. C12Q 1/6844; C12Q 1/6883

(52) U.S. Cl. CPC C12Q 1/6844; C12Q 1/6883; C12Q 2600/16

(57) ABSTRACT

The present disclosure provides methods, compositions, kits, and systems useful in the determination and evaluation of the immune repertoire. In one aspect, target-specific primer panels provide for the effective amplification of sequences of B cell receptor heavy and light chains in a single assay, with improved sequencing accuracy and resolution over the repertoire. Variable regions associated with the immune cell receptor are resolved to effectively portray clonal diversity of a biological sample and/or differences associated with the immune cell repertoire of a biological sample.

### RELATED APPLICATIONS

[0001] This application is a continuation of International Application No. PCT/US2021/072434, filed Nov. 16, 2021, which in turn claims priority to and the benefit under 35 USC § 119(e) of each of U.S. Provisional Application No. 63/198,843 filed Nov. 16, 2020, U.S. Provisional Application No. 63/201,048 filed Apr. 9, 2021, and U.S. Provisional Application No. 63/203,337, filed Jul. 17, 2021. The entire contents of each of the aforementioned applications are herein incorporated by reference in their entirety.

### SEQUENCE LISTING

[0002] This application hereby incorporates by reference the material of the electronic Sequence Listing filed concurrently herewith. The material in the electronic Sequence Listing is submitted as an Extensible Markup Language (.xml) file entitled “TP109031USCON1-WO1_ST26.xml” created on May 14, 2023 which has a file size of 3,298,198 bytes and is herein incorporated by reference in its entirety.

### BACKGROUND

[0003] Adaptive immune response comprises selective response of B and T cells recognizing antigens. The immunoglobulin genes encoding antibody (Ab, in B cell) and T-cell receptor (TCR, in T cell) antigen receptors comprise complex loci wherein extensive diversity of receptors is produced as a result of recombination of the respective variable (V), diversity (D), and joining (J) gene segments, as well as subsequent somatic hypermutation events during early lymphoid differentiation. The recombination process occurs separately for both subunit chains of each receptor and subsequent heterodimeric pairing creates still greater combinatorial diversity. Calculations of the potential combinatorial and junctional possibilities that contribute to the human immune receptor repertoire have estimated that the number of possibilities greatly exceeds the total number of peripheral B or T cells in an individual. See, for example, Davis and Bjorkman (1988) Nature 334:395-402; Arstila et al. (1999) Science 286:958-961; van Dongen et al., In: Leukemia, Henderson et al. (eds) Philadelphia: WB Saunders Company, 2002, pp 85-429.

[0004] Extensive efforts have been made over years to improve analysis of the immune repertoire at high resolution. Means for specific detection and monitoring of expanded clones of lymphocytes would provide significant opportunities for characterization and analysis of normal and pathogenic immune reactions and responses. Despite efforts, effective high resolution analysis has provided challenges. Advances in next generation sequencing (NGS) have provided access to capturing the repertoire, however, due to the nature of the numerous related sequences and introduction of sequence errors as a result of the technology, efficient and effective reflection of the true repertoire has proven difficult. Interactions of primer-primer dimers as well as incompatibility of reaction conditions in multiplex PCR assays often require separate PCR reactions to survey each immunoglobulin chain and sometimes within each immunoglobulin chain, often leading to a longer time-to-result for samples in which no marker is initially detected. Thus, there remains a need for improved sequencing methodologies and workflows capable of efficiently resolving complex populations of highly variable immune cell receptor sequences for effective profiling of vast repertoires of immune cell receptors in order to better understand immune cell response, enhance diagnostic and treatment capabilities, and devise new therapeutics.

### SUMMARY OF THE INVENTION

[0005] In one aspect of the invention compositions are provided for a single stream determination of an immune repertoire in a sample. In some embodiments the composition comprises at least one set of primers i) and ii) and iii), wherein i) consists of a plurality of variable (V) gene primers directed to a majority of different variable regions of an immune receptor IgH coding sequence and a plurality of joining (J) gene primers directed to at least a portion of a majority of different J genes of an immune receptor IgH coding sequence; and ii) consists one or more variable (V) gene primers directed to at least a portion of the respective target variable region of the respective immune receptor IgL lambda coding sequence and a plurality of joining (J) gene primers directed to at least a portion of a majority of different J genes of an immune receptor IgLlambda coding sequence; and iii) consists one or more variable (V) gene primers directed to at least a portion of the respective target variable region of the respective immune receptorIgL kappa coding sequence and a plurality of joining (J) gene primers directed to at least a portion of a majority of different J genes of an immune receptor IgLkappa coding sequence. In some embodiments the composition for analysis of a B cell receptor (BCR) repertoire in a sample comprises at least one set of primers i) and ii) and iii), wherein i) consists of (a) a plurality of V gene primers directed to a majority of different V genes of BCR IgH coding sequence comprising at least a portion of framework region 3 (FR3) within the V gene, and (b) a plurality of J gene primers directed to a majority of different J genes of BCR IgH coding sequence; and ii) consists of (a) one or more V gene primers directed to at least a portion of a V gene of the BCR IgL lambda coding sequence comprising at least a portion of framework region 3 (FR3) within the V gene, and (b) a plurality of J gene primers directed to at least a portion of a majority of different J genes of the BCR IgL lambda coding sequence; and iii) consists of (a) one or more V gene primers directed to at least a portion of a V gene of the BCR IgL kappa coding sequence comprising at least a portion of framework region 3 (FR3) within the V gene, and (b) a plurality of J gene primers directed to at least a portion of a majority of different J genes of the BCR IgL kappa coding sequence; wherein each set of i) and ii) and iii) primers directed to coding sequences of the same target BCR gene selected from IgH, IgLlambda, and IgLkappa; and wherein each set of i) and ii) and iii) primers directed to the same target BCR is configured to amplify the target BCR repertoire. In certain embodiments compositions further comprise iv) consisting of (a) one or more gene primers directed to a IgLkappa Cintron sequence and (b) one or more gene primers directed to a KDE sequence. In still other embodiments the composition comprises at least one set of primers i) and ii), wherein i) consists (a) plurality of V gene primers directed to a majority of different V genes of at least one BCR coding sequence comprising at least a portion of distal FR3 within the V gene of the IgH BCR coding sequence and/or (b) a plurality of V gene primers directed to a majority of different V genes of at least one BCR coding sequence comprising at least a portion of FR2 within the V gene of the IgH BCR coding sequence; and ii) consists a plurality of J gene primers directed to at least a portion of a majority of different J genes of the at least one IgH BCR coding sequence.

[0006] In some aspects, a multiplex assay comprising compositions of the invention is provided. In some embodiments a test kit comprising compositions of the invention is provided.

[0007] In other aspects of the invention, methods are provided for determining immune repertoire activity in a biological sample. Such methods comprise performing multiplex amplification with primer set which target two different types of immune receptors, for example, multiplex amplification of BCR targets in a single reaction.

[0008] In some embodiments, the method for amplification of rearranged genomic DNA (gDNA) sequences of a B cell receptor (BCR) repertoire in a sample comprises performing a single multiplex amplification reaction to amplify expressed target immune receptor nucleic acid template molecules using at least one set of:
[0009] i) (a) a plurality of V gene primers directed to a majority of different V genes of BCR IgH coding sequence comprising at least a portion of framework region 3 (FR3) within the V gene,
   [0010] (b) a plurality of J gene primers directed to at least a portion of a majority of different J genes of the BCR IgH coding sequence; and
[0011] ii) (a) a plurality of V gene primers directed to a majority of different V genes of BCR IgLlambda coding sequence comprising at least a portion of framework region 3 (FR3) within the V gene,
   [0012] (b) a plurality of J gene primers directed to at least a portion of a majority of different J genes of the BCR IgLlambda coding sequence; and
[0013] iii) (a) a plurality of V gene primers directed to a majority of different V genes of BCR IgLkappa coding sequence comprising at least a portion of framework region 1 (FR3) within the V gene,
   [0014] (b) a plurality of J gene primers directed to at least a portion of a majority of different J genes of the BCR IgLkappa coding sequence; and optionally
[0015] iv) (a) one or more gene primers directed to a IgLkappa Cintron sequence, and
   [0016] (b) one or more gene primers directed to a KDE sequence;
[0017] wherein each set of i) and ii) and iii) primers is directed to coding sequences of the same target BCR immune receptor gene selected from IgH, IgLlambda, and IgLkappa gene and wherein performing the amplification using the set of i) and ii) and iii) primers results in amplicon molecules representing the target BCR immune receptor repertoire in the sample; thereby generating immune receptor amplicon molecules comprising the target immune receptor repertoire.

[0018] In some embodiments, the method for amplification of rearranged genomic DNA (gDNA) sequences of a B cell receptor (BCR) repertoire in a sample comprises performing a single multiplex amplification reaction to amplify expressed target immune receptor nucleic acid template molecules using at least one set of:
[0019] i) (a) a plurality of V gene primers directed to a majority of different V genes of at least one BCR coding sequence comprising at least a portion of distal FR3 within the V gene, and/or
   [0020] (b) a plurality of V gene primers directed to a majority of different V genes of at least one BCR coding sequence comprising at least a portion of FR2 within the V gene; and
[0021] ii) a plurality of J gene primers directed to at least a portion of a majority of different J genes of the at least one BCR coding sequence;
[0022] wherein each set of i) and ii) primers is directed to coding sequences of the same target BCR IgH gene and wherein performing the amplification using the at least one set of i) and ii) primers results in amplicon molecules representing the target BCR repertoire in the sample; thereby generating target BCR amplicon molecules comprising the target BCR repertoire.

[0023] Methods of the invention further comprise preparing a BCR repertoire library using the amplified target immune receptor sequences through introducing adapter sequences to the termini of the amplified target sequences. In some embodiments, the adapter-modified immune receptor repertoire library is clonally amplified. The methods further comprise detecting sequences of the immune repertoire of each of the immune receptors in the sample and/or expression of each of the plurality of target immune receptor sequences, wherein a change in the level of repertoire sequences and/or expression of one or more target immune receptor markers as compared with a second sample or a control sample determines a change in immune repertoire activity in the sample. In certain embodiments sequencing of the immune receptor amplicon molecules is carried out using next generation sequence analysis to determine sequence of the immune receptor amplicons. In particular embodiments determining the sequence of the immune receptor amplicon molecules includes obtaining initial sequence reads, aligning and identifying productive reads and correcting errors to generate rescued productive reads and determining the sequences of the resulting total productive reads, thereby providing sequence of the immune repertoire in the sample. Provided methods described herein utilize compositions of the invention provided herein. In still other aspects of the invention, particular analysis methodology for error correction is provided in order to generate comprehensive, effective sequence information from methods provided herein.

[0024] In another aspect, methods are provided for identifying or screening for a biomarker for a disease or condition in a subject using provided compositions and methods described herein. In some embodiments, the disease or condition a biomarker is identified or screened is selected from cancer, autoimmune disease, infectious disease, allergy, response to vaccination, and response to an immunotherapy treatment.

### BRIEF DESCRIPTION OF THE DRAWINGS

[0025] FIGS. 1A-1C are diagrams of depicting assays of the invention. (A) depicts a B cell clonality assay for detection of IGH, IGkappa, IGlambda comprising FR3-J primers as well as KDE/Cint primers in a single library preparation reaction; (B) depicts two additional IGH assays targeting distal regions of FR3 (FR3(d)-J) and FR2-J regions; (C) depicts two additional IGH assays targeting leader-J) and FR1-J regions.

### DESCRIPTION OF THE INVENTION

[0026] We have developed a multiplex library preparation technology and sequencing workflow for effective detection and analysis of the B cell immune repertoire in a sample. Provided methods enable a single reaction for profiling B cell receptor heavy and light chains using a single library assay. Combining receptors in a single reaction allows for a higher success rate in clonality detection while maintaining the ability to efficiently detect rare clones of IGH, IGK, and IG chain rearrangements (e.g., down to 1:10⁶). Provided methods simplify the workflow for clonality assessment and rare clone detection of B cells, e.g., in B cell malignancies. Provided methods and compositions herein represent an advancement in repertoire assessment by NGS, by combining multiple B-cell receptor targets in a single library construction reaction. Multiple receptor assays allow for simpler determination of clonality from DNA samples using fewer secondary tests and conserving sample material.

[0027] We have developed a multiplex next generation sequencing workflow for effective detection and analysis of the immune repertoire in a sample. Provided methods, compositions, systems, and kits are for use in high accuracy amplification and sequencing of immune cell receptor sequences (e.g., B cell receptor (BCR or Ab) targets) in monitoring and resolving complex immune cell repertoire(s) in a subject. The target immune cell receptor genes have undergone rearrangement (or recombination) of the VDJ or VJ gene segments, the gene segments depending on the particular receptor gene (e.g., IgH, IgLkappa, IgLlambda). In certain embodiments, the present disclosure provides methods, compositions, and systems that use nucleic acid amplification, such as PCR, to enrich rearranged target immune cell receptor gene sequences from gDNA for subsequent sequencing. In certain embodiments, the present disclosure also provides methods and systems for effective identification and removal of amplification or sequencing-derived error(s) to improve read assignment accuracy and lower the false positive rate. In particular, provided methods described herein may improve accuracy and performance in sequencing applications with nucleotide sequences associated with genomic recombination and high variability. In some embodiments, methods, compositions, systems, and kits provided herein are for use in amplification and sequencing of the CDRs of rearranged immune cell receptor gDNA in a sample. Thus, provided herein are multiplex immune cell receptor expression compositions and immune cell receptor gene-directed compositions for multiplex library preparation, used in conjunction with next generation sequencing technologies and workflow solutions (e.g., manual or automated), for effective detection and characterization of the immune repertoire in a sample.

[0028] The CDRs of a BCR result from genomic DNA undergoing recombination of the V(D)J gene segments as well as addition and/or deletion of nucleotides at the gene segment junctions. Recombination of the V(D)J gene segments and subsequent hypermutation events leads to extensive diversity of the expressed immune cell receptors. With the stochastic nature of V(D)J recombination, it is often the case that rearrangement of the B cell receptor genomic DNA will fail to produce a functional receptor, instead producing what is termed an “unproductive” rearrangement. Typically, unproductive rearrangements have out-of-frame Variable and Joining coding segments, and lead to the presence of premature stop codons and synthesis of irrelevant peptides. Unproductive BCR gene rearrangements are generally rare in cDNA-based repertoire sequencing for a number of biological or physiological reasons such as: 1) nonsense-mediated decay, which destroys mRNA containing premature stop codons, 2) B cell selection, where only B cells with a functional receptor survive, and 3) allelic exclusion, where only a single rearranged receptor allele is expressed in any given B cell.

[0029] BCR sequences can also appear as unproductive rearrangements from errors introduced during amplification reactions or during sequencing processes. For example, an insertion or deletion (indel) error during a target amplification or sequencing reaction can cause a frameshift in the reading frame of the resulting coding sequence. Such a change may result in a target sequence read of a productive rearrangement being interpreted as an unproductive rearrangement and discarded from the group of identified clonotypes. Accordingly, in some embodiments, methods and systems provided herein include processes for identification and/or removing PCR or sequencing-derived error from the determined immune receptor sequence.

[0030] In some embodiments, methods and compositions provided are used for amplifying the rearranged variable regions of immune cell receptor gDNA, e.g., rearranged BCR gene DNA. Multiplex amplification is used to enrich for a portion of rearranged BCR gDNA which includes at least a portion of the variable region of the receptor. In some embodiments, the amplified gDNA includes one or more complementarity determining regions CDR1, CDR2, and/or CDR3 for the target receptor. In some embodiments, the amplified gDNA includes one or more complementarity determining regions CDR2, and/or CDR3 for IgH. In some embodiments, the amplified gDNA includes primarily CDR3 for the target receptor, e.g., CDR3 for IgH.

[0031] As used herein, “immune cell receptor” and “immune receptor” are used interchangeably.

[0032] As used herein, the terms “complementarity determining region” and “CDR” refer to regions of a B cell receptor or an antibody (immunoglobulin) where the molecule complements an antigen's conformation, thereby determining the molecule's specificity and contact with a specific antigen. In the variable regions of B cell receptors, the CDRs are interspersed with regions that are more conserved, termed framework regions (FR). Each variable region of a B cell receptor contains 3 CDRs, designated CDR1, CDR2 and CDR3, and also contains 4 framework sub-regions, designated FR1, FR2, FR3 and FR4.

[0033] As used herein, the term “framework” or “framework region” or “FR” refers to the residues of the variable region other than the CDR residues as defined herein. There are four separate framework sub-regions that make up the framework: FR1, FR2, FR3, and FR4.

[0034] The particular designation in the art for the exact location of the CDRs and FRs within the receptor molecule (BCR or immunoglobulin) varies depending on what definition is employed. Unless specifically stated otherwise, the IMGT designations are used herein in describing the CDR and FR regions (see Brochet et al. (2008) Nucleic Acids Res. 36:W503-508, herein specifically incorporated by reference).

[0035] Other well-known standard designations for describing the regions include those found in Kabat et al., (1991) Sequences of Proteins of Immunological Interest, 5th Ed. Public Health Service, National Institutes of Health, Bethesda, Md., and in Chothia and Lesk (1987) J. Mol. Biol. 196:901-917; herein specifically incorporated by reference. As one example of CDR designations, the residues that make up the six immunoglobulin CDRs have been characterized by Kabat as follows: residues 24-34 (CDRL1), (CDRL2) and 89-97 (CDRL3) in the light chain variable region and 31-35 (CDRH1), 50-65 (CDRH2) and 95-102 (CDRH3) in the heavy chain variable region; and by Chothia as follows: residues 26-32 (CDRL1), 50-52 (CDRL2) and 91-96 (CDRL3) in the light chain variable region and 26-32 (CDRH1), 53-55 (CDRH2) and 96-101 (CDRH3) in the heavy chain variable region.

[0036] The term “antibody” or immunoglobulin” or “B cell receptor” or “BCR,” as used herein, is intended to refer to immunoglobulin molecules comprised of four polypeptide chains, two heavy (H) chains and two light (L) chains (lambda or kappa) inter-connected by disulfide bonds. An antibody has a known specific antigen with which it binds. Each heavy chain of an antibody is comprised of a heavy chain variable region (abbreviated herein as HCVR, HV or VH) and a heavy chain constant region. The heavy chain constant region is comprised of three domains, CHL CH2 and CH3. Each light chain is comprised of a light chain variable region (abbreviated herein as LCVR or VL or KV or LV to designate kappa or lambda light chains) and a light chain constant region. The light chain constant region is comprised of one domain, CL. The heavy chain determines the class or isotype to which the immunoglobulin belongs. In mammals, for example, the five main immunoglobulin isotypes are IgA, IgD, IgG, IgE and IgM and they are classed according to the alpha, delta, epsilon, gamma or mu heavy chain they contain, respectively.

[0037] As noted, the diversity of the BCR chain CDRs is created by recombination of germline variable (V), diversity (D), and joining (J) gene segments, as well as by independent addition and deletion of nucleotides at each of the gene segment junctions during the process of BCR gene rearrangement. In the rearranged nucleic acid encoding a BCR heavy chain, CDR1 and CDR2 are found in the V gene segment and CDR3 includes some of the V gene segment and the D and J gene segments. In the rearranged nucleic acid encoding a BCR light chain, CDR1 and CDR2 are found in the V gene segment and CDR3 includes some of the V gene segment and the J gene segment.

[0038] In some embodiments, a multiplex amplification reaction is used to amplify BCR genomic DNA having undergone V(D)J rearrangement. In some embodiments, a multiplex amplification reaction is used to amplify nucleic acid molecule(s) comprising at least a portion of a BCR CDR from gDNA derived from a biological sample. In some embodiments, a multiplex amplification reaction is used to amplify nucleic acid molecule(s) comprising at least two CDRs of a BCR from gDNA derived from a biological sample. In some embodiments, a multiplex amplification reaction is used to amplify nucleic acid molecules comprising at least three CDRs of a BCR from gDNA derived from a biological sample. In some embodiments, the resulting amplicons are used to determine the nucleotide sequences of the rearranged BCR CDRs in the sample. In some embodiments, determining the nucleotide sequences of such amplicons comprising at least CDR3 is used to identify and characterize novel BCR alleles

[0039] In some embodiments of the multiplex amplification reactions, each primer set used target a same BCR region however the different primers in the set permit targeting the gene's different V(D)J gene rearrangements. For example, the primer set for amplification of the expressed IgH or the rearranged IgH gDNA are all designed to target the same region(s) from IgH mRNA or IgH gDNA, respectively, but the individual primers in the set lead to amplification of the various IgH VDJ gene combinations. In some embodiments, at least one primer set includes a variety of primers directed to at least a portion of J gene segments of an immune receptor gene and the other primer set includes a variety of primers directed to at least a portion of V gene segments of the same gene.

[0040] In some embodiments, a multiplex amplification reaction is used to amplify cDNA derived from mRNA expressed from rearranged BCR genomic DNA, including rearranged IgH, IgLkappa, and IgLlambda genomic DNA. In some embodiments, at least a portion of a BCR CDR, for example CDR3, is amplified from cDNA in a multiplex amplification reaction. In some embodiments, at least two CDR portions of BCR are amplified from cDNA in a multiplex amplification reaction. In certain embodiments, a multiplex amplification reaction is used to amplify at least the CDR1, CDR2, and CDR3 regions of a BCR cDNA. In some embodiments, the resulting amplicons are used to determine the expressed BCR CDR nucleotide sequence. In some embodiments, the resulting amplicons are used to determine the expressed BCR CDR nucleotide sequence and Ig isotype of the sequence. In some embodiments, the resulting amplicons are used to determine the expressed IgH CDR nucleotide sequence and the Ig isotype and Ig sub-isotype.

[0041] In some embodiments, a multiplex amplification reaction is used to amplify rearranged BCR genomic DNA, including rearranged IgH, IgLkappa, and IgLlambda genomic DNA. In some embodiments, at least a portion of a BCR CDR, for example CDR3, is amplified from gDNA in a multiplex amplification reaction. In some embodiments, at least two CDR portions of BCR are amplified from gDNA in a multiplex amplification reaction. In certain embodiments, a multiplex amplification reaction is used to amplify at least the CDR2, and CDR3 regions of a rearranged BCR gDNA. In some embodiments, the resulting amplicons are used to determine the rearranged BCR CDR nucleotide sequence. In some embodiments, the resulting amplicons are used to determine the rearranged BCR CDR nucleotide sequence and Ig isotype of the sequence.

[0042] In some embodiments, multiplex amplification reactions are performed with primer sets designed to generate amplicons which include the expressed CDR3 regions of the target immune receptor mRNA. In some embodiments, multiplex amplification reactions are performed using i) (a) a plurality of V gene primers directed to a majority of different V genes of BCR IgH coding sequence comprising at least a portion of framework region 3 (FR3) within the V gene and (b) a plurality of J gene primers directed to at least a portion of a majority of different J genes of the BCR IgH coding sequence; and ii) (a) a plurality of V gene primers directed to a majority of different V genes of BCR IgLlambda coding sequence comprising at least a portion of framework region 3 (FR3) within the V gene, (b) a plurality of J gene primers directed to at least a portion of a majority of different J genes of the BCR IgLlambda coding sequence; and iii) (a) a plurality of V gene primers directed to a majority of different V genes of BCR IgLkappa coding sequence comprising at least a portion of framework region 1 (FR3) within the V gene, wherein each set of i) and ii) and iii) primers is directed to coding sequences of the same BCR gene such that performing the amplification using the at least one set of i) and ii) primers results in amplicon molecules representing the target BCR repertoire in the sample; thereby generating target BCR amplicon molecules comprising the target BCR repertoire. For example, exemplary primers specific for IgH V gene FR3 regions are shown in Table 9 and exemplary primers specific for IgH J genes are shown in Table 6, exemplary primers specific for IgLkappa V gene FR3 regions are shown in Table 3 and exemplary primers specific for IgLkappa J genes are shown in Table 4, exemplary primers specific for IgLlambda V gene FR3 regions are shown in Table 1 and exemplary primers specific for IgLlambda J genes are shown in Table 2 and exemplary primers specific for KDE and Cint are shown in Table 5.

[0043] In some embodiments, the multiplex amplification reaction uses i) (a) a plurality of V gene primers directed to a majority of different V genes of at least one BCR coding sequence comprising at least a portion of distal FR3 within the V gene, and/or (b) a plurality of V gene primers directed to a majority of different V genes of at least one BCR coding sequence comprising at least a portion of FR2 within the V gene; and ii) a plurality of J gene primers directed to at least a portion of a majority of different J genes of the at least one BCR coding sequence, wherein each set of i) and ii) primers is directed to coding sequences of the same target BCR IgH gene such that performing the amplification using the at least one set of i) and ii) primers results in amplicon molecules representing the target BCR repertoire in the sample; thereby generating target BCR amplicon molecules comprising the target BCR repertoire. For example, exemplary primers specific for IgH V gene FR2 regions are shown in Table 7 and exemplary primers specific for IgH J genes are shown in Table 6 and exemplary primers specific for IgH V gene distalFR3 regions are shown in Table 8 and exemplary primers specific for IgH J genes are shown in Table 6.

[0044] In some embodiments, provided are compositions for multiplex amplification of at least a portion of an expressed BCR variable region. In some embodiments, the composition comprises a plurality of sets of primer pair reagents directed to a portion of a V gene framework region and a portion of a constant (C) gene of rearranged target immune receptor genes selected from the group consisting of immunoglobulin heavy chain (IgH), immunoglobulin light chain lambda (IgL), and immunoglobulin light chain kappa (IgK). In some embodiments, the composition comprises a plurality of sets of primer pair reagents directed to a portion of a V gene framework region and a portion of a J gene of rearranged target immune receptor genes selected from the group consisting of IgH, IgLkappa and IgLlambda.

[0045] In some embodiments, provided methods comprise multiplex amplification reactions performed with primer sets designed to generate amplicons which include the CDR1, CDR2 and CDR3 regions of the target immune receptor nucleic acid. In some embodiments, multiplex amplification reactions are performed using i) (a) a plurality of V gene primers directed to a majority of different V genes of BCR IgH coding sequence comprising at least a portion of framework region 1 (FR1) within the V gene or (b) a plurality of V gene primers directed to a majority of different V genes of BCR IgH coding sequence comprising at least a portion of leader region within the V gene; and ii) a plurality of J gene primers directed to at least a portion of a majority of different J genes of the BCR IgH coding sequence; wherein each set of i) and ii) primers is directed to coding sequences of the same BCR gene such that performing the amplification using the at least one set of i) and ii) primers results in amplicon molecules representing the target BCR repertoire in the sample; thereby generating target BCR amplicon molecules comprising the target BCR repertoire. For example, exemplary primers specific for IgH V gene FR1 regions are shown in Table 11 and exemplary primers specific for IgH J genes are shown in Table 6, exemplary primers specific for IgH V gene leader regions are shown in Table 10 and exemplary primers specific for IgH J genes are shown in Table 6.

[0046] In some embodiments, provided are compositions for multiplex amplification of at least a portion of an expressed BCR variable region. In some embodiments, the composition comprises a plurality of sets of primer pair reagents directed to a portion of a V gene framework region FR1 and a portion of a joining (J) gene of rearranged target immune receptor genes selected from (IgH). In some embodiments, the composition comprises a plurality of sets of primer pair reagents directed to a portion of a V gene leader region and a portion of a J gene of rearranged target immune receptor genes selected from IgH immunoglobulin heavy chain.

[0047] Amplification by PCR is performed with at least two primers. For the methods provided herein, a set of primers is used that is sufficient to amplify all or a defined portion of the variable sequences at the locus of interest, which locus may include any or all of the aforementioned BCR immunoglobulin loci. In some embodiments, various parameters or criteria outlined herein may be used to select the set of target-specific primers for the multiplex amplification.

[0048] In some embodiments, primer sets used in the multiplex reactions are designed to amplify at least 50% of the known expressed or gDNA rearrangements at the locus of interest. In certain embodiments, primer sets used in the multiplex reactions are designed to amplify at least 75%, at least 85%, at least 90%, at least 95%, at least 97%, at least 98% or more of the known expressed or gDNA rearrangements at the locus of interest.

[0049] For example, such a multiplex amplification reaction includes at least 15, 20, 25, 30, 35, 40, 45, 55, 60, 65, 70, 75, 80, 85, or 90, preferably 22, 23, 24, 25, 26, 27, 28, 29, 30, 34, 38, 42, 46, 50, 54, 58, or 62 reverse primers in which each reverse primer is directed to a sequence corresponding to at least a portion of one or more BCR V gene FR3 regions. In such embodiments, the plurality of reverse primers directed to the BCR V gene FR3 regions is combined with at least 1 forward primer directed to a sequence corresponding to at least a portion of a joining J gene of the same BCR gene. In some embodiments, the plurality of reverse primers directed to the BCR V gene FR3 regions is combined with at least 2, at least 3, at least 4, at least 5, at least 6, at least 7, at least 8, at least 9, at least 10, at least 11, at least 12, at least 15, or about 2 to about 7, about 5 to about 20, about 5 to about 15, or about 7 to about 12 forward primers each directed to a sequence corresponding to at least a portion of at least one of the J genes of the same BCR gene. In some embodiments of the multiplex amplification reactions, the BCR V gene FR3 directed primers may be the forward primers and the BCR J gene-directed primer(s) may be the reverse primer(s). Accordingly, in some embodiments, a multiplex amplification reaction includes at least 15, 20, 25, 30, 35, 40, 45, 50, 55, 60, 65, 70, 75, 80, 85, or 90, preferably 22, 23, 24, 25, 26, 27, 28, 29, 30, 34, 38, 42, 46, 50, 54, 58, or 62 forward primers in which each forward primer is directed to a sequence corresponding to at least a portion of one or more BCR V gene FR3 regions. In such embodiments, the plurality of forward primers directed to the BCR V gene FR33regions is combined with at least 1 reverse primer directed to a sequence corresponding to at least a portion of a J gene of the same BCR gene. In some embodiments, the plurality of forward primers directed to the BCR V gene FR3 regions is combined with at least 2, at least 3, at least 4, at least 5, at least 6, at least 7, at least 8, at least 9, at least 10, at least 11, at least 12, at least 15, or about 2 to about 7, about 5 to about 20, about 5 to about 15, or about 7 to about 12 reverse primers each directed to a sequence corresponding to at least a portion of at least one of the J genes of the same BCR gene. In some embodiments, such FR3 and J gene amplification primer sets may be directed to IgH gene sequences. In some preferred embodiments, about 22 to about 35 reverse primers directed to different IgH V gene FR3 regions are combined with about 2 to about 8 forward primers directed to a portion of the IgH J genes. In other preferred embodiments, about 22 to about 35 reverse primers directed to different IgH V gene FR3 regions are combined with about 5 to about 15 forward primers directed to a portion of the IgH J genes. In other preferred embodiments, about 48 to about 60 reverse primers directed to different IgH V gene FR3 regions are combined with about 5 to about 15 forward primers directed to a portion of the IgH J genes. In some preferred embodiments, about 22 to about 35 forward primers directed to different IgH V gene FR3 regions are combined with about 2 to about 8 reverse primers directed to a portion of the IgH J genes. In other preferred embodiments, about 22 to about 35 forward primers directed to different IgH V gene FR3 regions are combined with about 5 to about 15 reverse primers directed to a portion of the IgH J genes. In yet other preferred embodiments, about 48 to about 60 forward primers directed to different IgH V gene FR3 regions are combined with about 5 to about 15 reverse primers directed to a portion of the IgH J genes. In some preferred embodiments, the forward primers directed to IgH V gene FR3 regions are selected from those listed in Table 8 and the reverse primers directed to the IgH J genes are selected from those listed in Table 6. In other embodiments, the FR3 and J gene amplification primer sets are directed to Ig light chain lambda, Ig light chain kappa gene sequences.

[0050] In some embodiments, a multiplex amplification reaction includes at least 5, 10, 15, 20, 25, 30, 40, 50, 60, 70, 80, or 90 reverse primers in which each reverse primer is directed to a sequence corresponding to at least a portion of one or more BCR V gene FR2 regions. In such embodiments, the plurality of reverse primers directed to the BCR V gene FR2 regions is combined with at least 1 forward primer directed to a sequence corresponding to at least a portion of a J gene of the same BCR gene. In some embodiments, the plurality of reverse primers directed to the BCR V gene FR2 regions is combined with at least 2, at least 3, at least 4, at least 5, at least 6, at least 7, at least 8, at least 9, at least 10, at least 11, at least 12, at least 15, or about 2 to about 7, about 5 to about 20, about 5 to about 15, or about 7 to about 12 forward primers each directed to a sequence corresponding to at least a portion of at least one of the J genes of the same BCR gene. In some embodiments of the multiplex amplification reactions, the BCR V gene FR2 directed primers may be the forward primers and the BCR J gene-directed primer(s) may be the reverse primer(s). Accordingly, in some embodiments, a multiplex amplification reaction includes at least 5, 10, 15, 20, 25, 30, 40, 50, 60, 70, 80, or 90 forward primers in which each forward primer is directed to a sequence corresponding to at least a portion of one or more BCR V gene FR2 regions. In such embodiments, the plurality of forward primers directed to the BCR V gene FR2 regions is combined with at least 1 reverse primer directed to a sequence corresponding to at least a portion of a J gene of the same BCR gene. In some embodiments, the plurality of forward primers directed to the BCR V gene FR2 regions is combined with at least 2, at least 3, at least 4, at least 5, at least 6, at least 7, at least 8, at least 9, at least 10, at least 11, at least 12, at least 15, or about 2 to about 7, about 5 to about 20, about 5 to about 15, or about 7 to about 12 reverse primers each directed to a sequence corresponding to at least a portion of at least one of the J genes of the same BCR gene. In some embodiments, such FR2 and J gene amplification primer sets may be directed to IgH gene sequences. In some embodiments, about 5 to about 15 reverse primers directed to different IgH V gene FR2 regions are combined with about 2 to about 8 forward primers directed to a portion of the IgH J gene. In some embodiments, about 5 to about 15 reverse primers directed to different IgH V gene FR2 regions are combined with about 5 to about 15 forward primers directed to a portion of the IgH J gene. In some embodiments, about 5 to about forward primers directed to different IgH V gene FR2 regions are combined with about 2 to about 8 reverse primers directed to a portion of the IgH J gene. In some embodiments, about 5 to about 15 forward primers directed to different IgH V gene FR2 regions are combined with about 5 to about 15 reverse primers directed to a portion of the IgH J gene. In some preferred embodiments, the forward primers directed to IgH V gene FR2 regions are selected from those listed in Table 7 and the reverse primers directed to the IgH J gene are selected from those listed in Table 6.

[0051] In some embodiments, a multiplex amplification reaction includes at least 5, 10, 15, 20, 25, 30, 50, 60, 70, 80, or 90 reverse primers in which each reverse primer is directed to a sequence corresponding to at least a portion of one or more BCR V gene FR2 regions. In such embodiments, the plurality of reverse primers directed to the BCR V gene FR1 regions is combined with at least 1 forward primer directed to a sequence corresponding to at least a portion of a J gene of the same BCR gene. In some embodiments, the plurality of reverse primers directed to the BCR V gene FR1 regions is combined with at least 2, at least 3, at least 4, at least 5, at least 6, at least 7, at least 8, at least 9, at least 10, at least 11, at least 12, at least 15, or about 2 to about 7, about 5 to about 20, about 5 to about 15, or about 7 to about 12 forward primers each directed to a sequence corresponding to at least a portion of at least one of the J genes of the same BCR gene. In some embodiments of the multiplex amplification reactions, the BCR V gene FR1 directed primers may be the forward primers and the BCR J gene-directed primer(s) may be the reverse primer(s). Accordingly, in some embodiments, a multiplex amplification reaction includes at least 5, 10, 15, 20, 25, 30, 40, 50, 60, 70, 80, or 90 forward primers in which each forward primer is directed to a sequence corresponding to at least a portion of one or more BCR V gene FR1 regions. In such embodiments, the plurality of forward primers directed to the BCR V gene FR1 regions is combined with at least 1 reverse primer directed to a sequence corresponding to at least a portion of a J gene of the same BCR gene. In some embodiments, the plurality of forward primers directed to the BCR V gene FR1 regions is combined with at least 2, at least 3, at least 4, at least 5, at least 6, at least 7, at least 8, at least 9, at least 10, at least 11, at least 12, at least 15, or about 2 to about 7, about 5 to about 20, about 5 to about 15, or about 7 to about 12 reverse primers each directed to a sequence corresponding to at least a portion of at least one of the J genes of the same BCR gene. In some embodiments, such FR1 and J gene amplification primer sets may be directed to IgH gene sequences. In some embodiments, about 5 to about 15 reverse primers directed to different IgH V gene FR1 regions are combined with about 2 to about 8 forward primers directed to a portion of the IgH J gene. In some embodiments, about 5 to about 15 reverse primers directed to different IgH V gene FR1 regions are combined with about 5 to about 15 forward primers directed to a portion of the IgH J gene. In some embodiments, about 5 to about forward primers directed to different IgH V gene FR1 regions are combined with about 2 to about 8 reverse primers directed to a portion of the IgH J gene. In some embodiments, about 5 to about 15 forward primers directed to different IgH V gene FR1 regions are combined with about 5 to about 15 reverse primers directed to a portion of the IgH J gene. In some preferred embodiments, the forward primers directed to IgH V gene FR1 regions are selected from those listed in Table 11 and the reverse primers directed to the IgH J gene are selected from those listed in Table 6.

[0052] In some embodiments, a multiplex amplification reaction includes at least 5, 10, 15, 20, 25, 30, 50, 60, 70, 80, or 90 reverse primers in which each reverse primer is directed to a sequence corresponding to at least a portion of one or more BCR V gene FR2 regions. In such embodiments, the plurality of reverse primers directed to the BCR V gene LEADER regions is combined with at least 1 forward primer directed to a sequence corresponding to at least a portion of a J gene of the same BCR gene. In some embodiments, the plurality of reverse primers directed to the BCR V gene LEADER regions is combined with at least 2, at least 3, at least 4, at least 5, at least 6, at least 7, at least 8, at least 9, at least 10, at least 11, at least 12, at least 15, or about 2 to about 7, about 5 to about 20, about 5 to about 15, or about 7 to about 12 forward primers each directed to a sequence corresponding to at least a portion of at least one of the J genes of the same BCR gene. In some embodiments of the multiplex amplification reactions, the BCR V gene LEADER directed primers may be the forward primers and the BCR J gene-directed primer(s) may be the reverse primer(s). Accordingly, in some embodiments, a multiplex amplification reaction includes at least 5, 10, 15, 20, 25, 30, 40, 50, 60, 70, 80, or 90 forward primers in which each forward primer is directed to a sequence corresponding to at least a portion of one or more BCR V gene LEADER regions. In such embodiments, the plurality of forward primers directed to the BCR V gene LEADER regions is combined with at least 1 reverse primer directed to a sequence corresponding to at least a portion of a J gene of the same BCR gene. In some embodiments, the plurality of forward primers directed to the BCR V gene LEADER regions is combined with at least 2, at least 3, at least 4, at least 5, at least 6, at least 7, at least 8, at least 9, at least 10, at least 11, at least 12, at least 15, or about 2 to about 7, about 5 to about 20, about 5 to about 15, or about 7 to about 12 reverse primers each directed to a sequence corresponding to at least a portion of at least one of the J genes of the same BCR gene. In some embodiments, such LEADER and J gene amplification primer sets may be directed to IgH gene sequences. In some embodiments, about 5 to about 15 reverse primers directed to different IgH V gene LEADER regions are combined with about 2 to about 8 forward primers directed to a portion of the IgH J gene. In some embodiments, about 5 to about 15 reverse primers directed to different IgH V gene LEADER regions are combined with about 5 to about 15 forward primers directed to a portion of the IgH J gene. In some embodiments, about 5 to about 15 forward primers directed to different IgH V gene LEADER regions are combined with about 2 to about 8 reverse primers directed to a portion of the IgH J gene. In some embodiments, about 5 to about 15 forward primers directed to different IgH V gene LEADER regions are combined with about 5 to about 15 reverse primers directed to a portion of the IgH J gene. In some preferred embodiments, the forward primers directed to IgH V gene LEADER regions are selected from those listed in Table 10 and the reverse primers directed to the IgH J gene are selected from those listed in Table 6.

[0053] In some embodiments, a multiplex amplification reaction includes at least 20, 25, 30, 40, 45, preferably 50, 55, 60, 65, 70, 75, 80, 85, or 90 reverse primers in which each reverse primer is directed to a sequence corresponding to at least a portion of one or more BCR V gene FR3 regions. In such embodiments, the plurality of reverse primers directed to the BCR V gene FR3 regions is combined with at least 1 forward primer directed to a sequence corresponding to at least a portion of a J gene of the same BCR gene. In some embodiments, the plurality of reverse primers directed to the BCR V gene FR3 regions is combined with at least 2, at least 3, at least 4, at least 5, at least 6, at least 7, at least 8, at least 9, at least 10, at least 11, at least 12, at least 15, or about 2 to about 7, about 5 to about 20, about 5 to about 15, or about 7 to about 12 forward primers each directed to a sequence corresponding to at least a portion of at least one of the J genes of the same BCR gene. In some embodiments of the multiplex amplification reactions, the BCR V gene FR3 directed primers may be the forward primers and the BCR J gene-directed primer(s) may be the reverse primer(s). Accordingly, in some embodiments, a multiplex amplification reaction includes at least 20, 25, 30, 40, 45, preferably 50, 55, 60, 65, 70, 75, 80, 85, or 90 reverse primers in which each forward primer is directed to a sequence corresponding to at least a portion of one or more BCR V gene FR3 regions. In such embodiments, the plurality of forward primers directed to the BCR V gene FR3 regions is combined with at least 1 reverse primer directed to a sequence corresponding to at least a portion of a J gene of the same BCR gene. In some embodiments, the plurality of forward primers directed to the BCR V gene FR3 regions is combined with at least 2, at least 3, at least 4, at least 5, at least 6, at least 7, at least 8, at least 9, at least 10, at least 11, at least 12, at least 15, or about 2 to about 7, about 5 to about 20, about 5 to about 15, or about 7 to about 12 reverse primers each directed to a sequence corresponding to at least a portion of at least one of the J genes of the same BCR gene. In some embodiments, such FR3 and J gene amplification primer sets may be directed to IgH gene sequences. In some preferred embodiments, about 62 to about 75 reverse primers directed to different IgH V gene FR3 regions are combined with about 2 to about 8 forward primers directed to a portion of IgH J genes. In other preferred embodiments, about 62 to about 75 reverse primers directed to different IgH V gene FR3 regions are combined with about 5 to about 15 forward primers directed to a portion of IgH J genes. In some preferred embodiments, about 62 to about 75 forward primers directed to different IgH V gene FR3 regions are combined with about 2 to about 8 reverse primers directed to a portion of IgH J genes. In other preferred embodiments, about 62 to about 75 forward primers directed to different IgH V gene FR3 regions are combined with about 5 to about 15 reverse primers directed to a portion of IgH J genes. In some preferred embodiments, the forward primers directed to IgH V gene FR3 regions are selected from those listed in Table 8 and the reverse primers directed to the IgH J gene are selected from those listed in Table 6.

[0054] In some embodiments, a multiplex amplification reaction includes at least 5, 10, 15, 20, 25, 30, 50, 60, 70, 80, or 90 reverse primers in which each reverse primer is directed to a sequence corresponding to at least a portion of one or more BCR V gene FR2 regions. In such embodiments, the plurality of reverse primers directed to the BCR V gene FR2 regions is combined with at least 2, 3, 4, 5, 6, 8, or about 3-6 forward primers directed to a sequence corresponding to at least a portion of a J gene of the same BCR gene. In some embodiments of the multiplex amplification reactions, the BCR V gene FR2-directed primers may be the forward primers and the BCR J gene-directed primers may be the reverse primers. Accordingly, in some embodiments, a multiplex amplification reaction includes at least 10, 15, 20, 25, 30, 40, 50, 60, 70, 80, or 90 forward primers in which each forward primer is directed to a sequence corresponding to at least a portion of one or more BCR V gene FR2 regions. In such embodiments, the plurality of forward primers directed to the BCR V gene FR2 regions is combined with at least 2, 3, 4, 5, 6, 8, or about 3-6 reverse primers directed to a sequence corresponding to at least a portion of a J gene of the same BCR gene. In some embodiments, such FR2 and J gene amplification primer sets may be directed to IgH gene sequences. In some preferred embodiments, about 5 to about 15 reverse primers directed to different IgH V gene FR2 regions are combined with about 3 to about 6 forward primers directed to different IgH J genes. In some preferred embodiments, about 5 to about 15 forward primers directed to different IgH V gene FR2 regions are combined with about 3 to about 6 reverse primers directed to different IgH J genes. In some preferred embodiments, the forward primers directed to IgH V gene FR2 regions are selected from those listed in Table 7 and the reverse primers directed to the IgH J gene are selected from those listed in Table 6.

[0055] In some embodiments, a multiplex amplification reaction includes at least 5, 10, 15, 20, 25, 30, 50, 60, 70, 80, or 90 reverse primers in which each reverse primer is directed to a sequence corresponding to at least a portion of one or more BCR V gene FR1 regions. In such embodiments, the plurality of reverse primers directed to the BCR V gene FR1 regions is combined with at least 2, 3, 4, 5, 6, 8, or about 3-6 forward primers directed to a sequence corresponding to at least a portion of a J gene of the same BCR gene. In some embodiments of the multiplex amplification reactions, the BCR V gene FR1-directed primers may be the forward primers and the BCR J gene-directed primers may be the reverse primers. Accordingly, in some embodiments, a multiplex amplification reaction includes at least 10, 15, 20, 25, 30, 40, 50, 60, 70, 80, or 90 forward primers in which each forward primer is directed to a sequence corresponding to at least a portion of one or more BCR V gene FR1 regions. In such embodiments, the plurality of forward primers directed to the BCR V gene FR1 regions is combined with at least 2, 3, 4, 5, 6, 8, or about 3-6 reverse primers directed to a sequence corresponding to at least a portion of a J gene of the same BCR gene. In some embodiments, such FR1 and J gene amplification primer sets may be directed to IgH gene sequences. In some preferred embodiments, about 5 to about 15 reverse primers directed to different IgH V gene FR1 regions are combined with about 3 to about 6 forward primers directed to different IgH J genes. In some preferred embodiments, about 5 to about 15 forward primers directed to different IgH V gene FR1 regions are combined with about 3 to about 6 reverse primers directed to different IgH J genes. In some preferred embodiments, the forward primers directed to IgH V gene FR1 regions are selected from those listed in Table 11 and the reverse primers directed to the IgH J gene are selected from those listed in Table 6.

[0056] In some embodiments, a multiplex amplification reaction includes at least 5, 10, 15, 20, 25, 30, 50, 60, 70, 80, or 90 reverse primers in which each reverse primer is directed to a sequence corresponding to at least a portion of one or more BCR V gene LEADER regions. In such embodiments, the plurality of reverse primers directed to the BCR V gene LEADER regions is combined with at least 2, 3, 4, 5, 6, 8, or about 3-6 forward primers directed to a sequence corresponding to at least a portion of a J gene of the same BCR gene. In some embodiments of the multiplex amplification reactions, the BCR V gene LEADER-directed primers may be the forward primers and the BCR J gene-directed primers may be the reverse primers. Accordingly, in some embodiments, a multiplex amplification reaction includes at least 5, 10, 15, 20, 25, 30, 40, 50, 60, 70, 80, or 90 forward primers in which each forward primer is directed to a sequence corresponding to at least a portion of one or more BCR V gene LEADER regions. In such embodiments, the plurality of forward primers directed to the BCR V gene LEADER regions is combined with at least 2, 3, 4, 5, 6, 8, or about 3-6 reverse primers directed to a sequence corresponding to at least a portion of a J gene of the same BCR gene. In some embodiments, such LEADER and J gene amplification primer sets may be directed to IgH gene sequences. In some preferred embodiments, about to about 15 reverse primers directed to different IgH V gene LEADER regions are combined with about 3 to about 6 forward primers directed to different IgH J genes. In some preferred embodiments, about 5 to about 15 forward primers directed to different IgH V gene LEADER regions are combined with about 3 to about 6 reverse primers directed to different IgH J genes. In some preferred embodiments, the forward primers directed to IgH V gene LEADER regions are selected from those listed in Table 10 and the reverse primers directed to the IgH J gene are selected from those listed in Table 6.

[0057] In some embodiments, the concentration of the forward primer is about equal to that of the reverse primer in a multiplex amplification reaction. In other embodiments, the concentration of the forward primer is about twice that of the reverse primer in a multiplex amplification reaction. In other embodiments, the concentration of the forward primer is about half that of the reverse primer in a multiplex amplification reaction. In some embodiments, the concentration of each of the primers targeting the V gene leader or FR region is about 5 nM to about 2000 nM. In some embodiments, the concentration of each of the primers targeting the V gene leader or FR region is about 50 nM to about 800 nM. In some embodiments, the concentration of each of the primers targeting the V gene leader or FR region is about 50 nM to about 400 nM or about 100 nM to about 500 nM. In some embodiments, the concentration of each of the primers targeting the V gene leader or FR region is about 200 nM, about 400 nM, about 600 nM, or about 800 nM. In some embodiments, the concentration of each of the primers targeting the V gene leader or FR region is about 5 nM, about 10 nM, about 50 nM, about 100 nM, about 150 nM. In some embodiments, the concentration of each of the primers targeting the V gene leader or FR region is about 1000 nM, about 1250 nM, about 1500 nM, about 1750 nM, or about 2000 nM. In some embodiments, the concentration of each of the primers targeting the V gene leader or FR region is about 50 nM to about 800 nM. In some embodiments, the concentration of each of the primers targeting the J gene is about 5 nM to about 2000 nM. In some embodiments, the concentration of each of the primers targeting the J gene is about 50 nM to about 800 nM. In some embodiments, the concentration of each of the primers targeting the J gene is about 50 nM to about 400 nM or about 100 nM to about 500 nM. In some embodiments, the concentration of each of the primers targeting the J gene is about 200 nM, about 400 nM, about 600 nM, or about 800 nM. In some embodiments, the concentration of each of the primers targeting the J gene is about 5 nM, about 10 nM, about 50 nM, about 100 nM, about 150 nM. In some embodiments, the concentration of each of the primers targeting the J gene is about 1000 nM, about 1250 nM, about 1500 nM, about 1750 nM, or about 2000 nM. In some embodiments, the concentration of each of the primers targeting the J gene is about 50 nM to about 800 nM. In some embodiments, the concentration of each of the primers targeting the Cint-KDE gene is about 5 nM to about 2000 nM. In some embodiments, the concentration of each of the primers targeting the Cint-KDE gene is about 50 nM to about 800 nM. In some embodiments, the concentration of each of the primers targeting the Cint-KDE gene is about 50 nM to about 400 nM or about 100 nM to about 500 nM. In some embodiments, the concentration of each of the primers targeting the Cint-KDE gene is about 200 nM, about 400 nM, about 600 nM, or about 800 nM. In some embodiments, the concentration of each of the primers targeting the Cint-KDE gene is about 5 nM, about 10 nM, about 50 nM, about 100 nM, about 150 nM. In some embodiments, the concentration of each of the primers targeting the Cint-KDE gene is about 1000 nM, about 1250 nM, about 1500 nM, about 1750 nM, or about 2000 nM. In some embodiments, the concentration of each of the primers targeting the Cint-KDE gene is about 50 nM to about 800 nM. In some embodiments, the concentration of each forward and reverse primer in a multiplex reaction is about nM, about 100 nM, about 200 nM, or about 400 nM. In some embodiments, the concentration of each forward and reverse primer in a multiplex reaction is about 5 nM to about 2000 nM. In some embodiments, the concentration of each forward and reverse primer in a multiplex reaction is about 50 nM to about 800 nM. In some embodiments, the concentration of each forward and reverse primer in a multiplex reaction is about 50 nM to about 400 nM or about 100 nM to about 500 nM. In some embodiments, the concentration of each forward and reverse primer in a multiplex reaction is about 600 nM, about 800 nM, about 1000 nM, about 1250 nM, about 1500 nM, about 1750 nM, or about 2000 nM. In some embodiments, the concentration of each forward and reverse primer in a multiplex reaction is about 5 nM, about 10 nM, about 150 nM or 50 nM to about 800 nM.

[0058] In some embodiments, the V gene FR and J gene target-directed primers combine as amplification primer pairs to amplify target immune receptor cDNA or rearranged gDNA sequences and generate target amplicons. Generally, the length of a target amplicon will depend upon which V gene primer set (eg, LEADER, FR1, FR2, and/or FR3 directed primers) is paired with the J gene primers. Accordingly, in some embodiments, target amplicons can range from about 50 nucleotides to about 350 nucleotides in length. In some embodiments, target amplicons are about 50 to about 200, about 70 to about 170, about 200 to about 350, about 250 to about 320, about 270 to about 300, about 225 to about 300, about 250 to about 275, about 200 to about 235, about 200 to about 250, or about 175 to about 275 nucleotides in length. In some embodiments, IgH amplicons are about 80, about 60 to about 100, or about to about 90 nucleotides in length. In some embodiments, IgH amplicons, such as those generated using V gene LEADER, FR1, FR2, and/or FR3- and J gene-directed primer pairs, are about 50 to about 200 nucleotides in length, preferably about 60 to about 160, about 65 to about 120, about 90 to about 120, about 70 to about 90 nucleotides, or about 80 nucleotides in length. In some embodiments, generating amplicons of such short lengths allows the provided methods and compositions to effectively detect and analyze the immune repertoire from highly degraded gDNA template material, such as that derived from an FFPE sample or cell-free DNA (cfDNA).

[0059] In some embodiments, amplification primers may include a barcode sequence, for example to distinguish or separate a plurality of amplified target sequences in a sample. In some embodiments, amplification primers may include two or more barcode sequences, for example to distinguish or separate a plurality of amplified target sequences in a sample. In some embodiments, amplification primers may include a tagging sequence that can assist in subsequent cataloguing, identification or sequencing of the generated amplicon. In some embodiments, the barcode sequence(s) or the tagging sequence(s) is incorporated into the amplified nucleotide sequence through inclusion in the amplification primer or by ligation of an adapter. Primers may further comprise nucleotides useful in subsequent sequencing, e.g. pyrosequencing. Such sequences are readily designed by commercially available software programs or companies.

[0060] In some embodiments, multiplex amplification is performed with target-directed amplification primers which do not include a tagging sequence. In other embodiments, multiplex amplification is performed with amplification primers each of which include a target-directed sequence and a tagging sequence such as, for example, the forward primer or primer set includes tagging sequence 1 and the reverse primer or primer set includes tagging sequence 2. In still other embodiments, multiplex amplification is performed with amplification primers where one primer or primer set includes target directed sequence and a tagging sequence and the other primer or primer set includes a target-directed sequence but does not include a tagging sequence, such as, for example, the forward primer or primer set includes a tagging sequence and the reverse primer or primer set does not include a tagging sequence.

[0061] Accordingly, in some embodiments, a plurality of target cDNA or gDNA template molecules are amplified in a single multiplex amplification reaction mixture with BCR directed amplification primers in which the forward and/or reverse primers include a tagging sequence and the resultant amplicons include the target BCR sequence and a tagging sequence on one or both ends. In some embodiments, the forward and/or reverse amplification primer or primer sets may also include a barcode and the one or more barcode is then included in the resultant amplicon.

[0062] In some embodiments, a plurality of target cDNA or gDNA template molecules are amplified in a single multiplex amplification reaction mixture with BCR directed amplification primers and the resultant amplicons contain only BCR. In some embodiments, a tagging sequence is added to the ends of such amplicons through, for example, adapter ligation. In some embodiments, a barcode sequence is added to one or both ends of such amplicons through, for example, adapter ligation.

[0063] Nucleotide sequences suitable for use as barcodes and for barcoding libraries are known in the art. Adapters and amplification primers and primer sets including a barcode sequence are commercially available. Oligonucleotide adapters containing a barcode sequence are also commercially available including, for example, IonXpress™, IonCode™ and Ion Select barcode adapters (Thermo Fisher Scientific). Similarly, additional and other universal adapter/primer sequences described and known in the art (e.g., Illumina universal adapter/primer sequences, PacBio universal adapter/primer sequences, etc.) can be used in conjunction with the methods and compositions provided herein and the resultant amplicons sequenced using the associated analysis platform.

[0064] In some embodiments, two or more barcodes are added to amplicons when sequencing multiplexed samples. In some embodiments, at least two barcodes are added to amplicons prior to sequencing multiplexed samples to reduce the frequency of artefactual results (e.g., immune receptor gene rearrangements or clone identification) derived from barcode cross-contamination or barcode bleed-through between samples. In some embodiments, at least two bar codes are used to label samples when tracking low frequency clones of the immune repertoire. In some embodiments, at least two barcodes are added to amplicons when the assay is used to detect clones of frequency less than 1:1,000. In some embodiments, at least two barcodes are added to amplicons when the assay is used to detect clones of frequency less than 1:10,000. In other embodiments, at least two barcodes are added to amplicons when the assay is used to detect clones of frequency less than 1:20,000, less than 1:40,000, less than 1:100,000, less than 1:200,000, less than 1:400,000, less than 1:500,00, or less than 1:1,000,000. Methods for characterizing the immune repertoire which benefit from a high sequencing depth per clone and/or detection of clones at such low frequencies include, but are not limited to, monitoring a patient with a hyperproliferative disease undergoing treatment and testing for minimal residual disease following treatment.

[0065] In some embodiments, target-specific primers (e.g., the V gene LEADER, FR1, FR2, and/or FR3-directed primers, the J gene directed primers, and the Cint-KDE gene directed primers) used in the methods of the invention are selected or designed to satisfy any one or more of the following criteria: (1) includes two or more modified nucleotides within the primer sequence, at least one of which is included near or at the termini of the primer and at least one of which is included at, or about the center nucleotide position of the primer sequence; (2) length of about 15 to about 40 bases in length; (3) Tm of from above 60° C. to about 70° C.; (4) has low cross-reactivity with non-target sequences present in the sample of interest; (5) at least the first four nucleotides (going from 3′ to 5′ direction) are non-complementary to any sequence within any other primer present in the same reaction; and (6) non-complementarity to any consecutive stretch of at least 5 nucleotides within any other produced target amplicon. In some embodiments, the target-specific primers used in the methods provided are selected or designed to satisfy any 2, 3, 4, 5, or 6 of the above criteria.

[0066] In some embodiments, the target-specific primers used in the methods of the invention include one or more modified nucleotides having a cleavable group. In some embodiments, the target-specific primers used in the methods of the invention include two or more modified nucleotides having cleavable groups. In some embodiments, the target-specific primers comprise at least one modified nucleotide having a cleavable group selected from methylguanine, 8-oxo-guanine, xanthine, hypoxanthine, 5,6-dihydrouracil, uracil, 5-methylcytosine, thymine-dimer, 7-methylguanosine, 8-oxo-deoxyguanosine, xanthosine, inosine, dihydrouridine, bromodeoxyuridine, uridine or 5-methylcytidine.

[0067] In some embodiments, target amplicons using the amplification methods (and associated compositions, systems, and kits) disclosed herein, are used in the preparation of an immune receptor repertoire library. In some embodiments, the immune receptor repertoire library includes introducing adapter sequences to the termini of the target amplicon sequences. In certain embodiments, a method for preparing an immune receptor repertoire library includes generating target immune receptor amplicon molecules according to any of the multiplex amplification methods described herein, treating the amplicon molecule by digesting a modified nucleotide within the amplicon molecules' primer sequences, and ligating at least one adapter to at least one of the treated amplicon molecules, thereby producing a library of adapter-ligated target immune receptor amplicon molecules comprising the target immune receptor repertoire. In some embodiments, the steps of preparing the library are carried out in a single reaction vessel involving only addition steps. In certain embodiments, the method further includes clonally amplifying a portion of the at least one adapter-ligated target amplicon molecule.

[0068] In some embodiments, target amplicons using the methods (and associated compositions, systems, and kits) disclosed herein, are coupled to a downstream process, such as but not limited to, library preparation and nucleic acid sequencing. For example, target amplicons can be amplified using bridge amplification, emulsion PCR or isothermal amplification to generate a plurality of clonal templates suitable for nucleic acid sequencing. In some embodiments, the amplicon library is sequenced using any suitable DNA sequencing platform such as any next generation sequencing platform, including semi-conductor sequencing technology such as the Ion Torrent sequencing platform. In some embodiments, an amplicon library is sequenced using an Ion GeneStudio S5 540™ System or an Ion GeneStudio S5 520™ System or an Ion GeneStudio S5 530™ System or an Ion PGM 318™ System or an Ion Genexus™ System.

[0069] In some embodiments, sequencing of immune receptor amplicons generated using the methods (and associated compositions and kits) disclosed herein, produces contiguous sequence reads from about 200 to about 600 nucleotides in length. In some embodiments, contiguous read lengths are from about 300 to about 400 nucleotides. In some embodiments, contiguous read lengths are from about 350 to about 450 nucleotides. In some embodiments, read lengths average about 300 nucleotides, about 350 nucleotides, or about 400 nucleotides. In some embodiments, contiguous read lengths are from about 250 to about 350 nucleotides, about 275 to about 340, or about 295 to about 325 nucleotides in length. In some embodiments, read lengths average about 270, about 280, about 290, about 300, or about 325 nucleotides in length. In other embodiments, contiguous read lengths are from about 180 to about 300 nucleotides, about 200 to about 290 nucleotides, about 225 to about 280 nucleotides, or about 230 to about 250 nucleotides in length. In some embodiments, read lengths average about 200, about 220, about 230, about 240, or about 250 nucleotides in length. In other embodiments, contiguous read lengths are from about 70 to about 200 nucleotides, about 80 to about 150 nucleotides, about 90 to about 140 nucleotides, or about 100 to about 120 nucleotides in length. In some embodiments, contiguous read lengths are from about 50 to about 170 nucleotides, about 60 to about 160 nucleotides, about 60 to about 120 nucleotides, about 70 to about 100 nucleotides, about 70 to about 90 nucleotides, or about 80 nucleotides in length. In some embodiments, read lengths average about 70, about 80, about 90, about 100, about 110, or about 120 nucleotides. In some embodiments, the sequence read length include the amplicon sequence and a barcode sequence. In some embodiments, the sequence read length does not include a barcode sequence.

[0070] In some embodiments, the amplification primers and primer pairs are target-specific sequences that can amplify specific regions of a nucleic acid molecule. In some embodiments, the target-specific primers can amplify expressed RNA or cDNA. In some embodiments, the target-specific primers can amplify mammalian RNA, such as human RNA or cDNA prepared therefrom, or murine RNA or cDNA prepared therefrom. In some embodiments, the target-specific primers can amplify DNA, such as gDNA. In some embodiments, the target-specific primers can amplify mammalian DNA, such as human DNA or murine DNA.

[0071] In methods and compositions provided herein, for example those for determining, characterizing, and/or tracking the immune repertoire in a biological sample, the amount of input RNA or gDNA required for amplification of target sequences will depend in part on the fraction of immune receptor bearing cells (e.g., B cells) in the sample. For example, a higher fraction of B cells in the sample, such as samples enriched for B cells, permits use of a lower amount of input RNA or gDNA for amplification. In some embodiments, the amount of input RNA for amplification of one or more target sequences can be about 0.05 ng to about 10 micrograms. In some embodiments, the amount of input RNA used for multiplex amplification of one or more target sequences can be from about 5 ng to about 2 micrograms. In some embodiments, the amount of RNA used for multiplex amplification of one or more target sequences can be from about 5 ng to about 1 microgram or about 10 ng to about 1 microgram. In some embodiments, the amount of RNA used for multiplex amplification of one or more immune repertoire target sequences is about 1.5 micrograms, about 2 micrograms, about 2.5 micrograms, about 3 micrograms, about 3.5 micrograms, about 4.0 micrograms, about 5 micrograms, about 6 micrograms, about 7 micrograms, or about 10 micrograms. In some embodiments, the amount of RNA used for multiplex amplification of one or more immune repertoire target sequences is about 10 ng, about 25 ng, about 50 ng, about 100 ng, about 200 ng, about 250 ng, about 500 ng, about 750 ng, or about 1000 ng. In some embodiments, the amount of RNA used for multiplex amplification of one or more immune repertoire target sequences is from about 25 ng to about 500 ng RNA or from about 50 ng to about 200 ng RNA. In some embodiments, the amount of RNA used for multiplex amplification of one or more immune repertoire target sequences is from about 0.05 ng to about 10 ng RNA, from about 0.1 ng to about 5 ng RNA, from about 0.2 ng to about 2 ng RNA, or from about 0.5 ng to about 1 ng RNA. In some embodiments, the amount of RNA used for multiplex amplification of one or more immune repertoire target sequences is about 0.05 ng, about 0.1 ng, about 0.2 ng, about 0.5 ng, about 1.0 ng, about 2.0 ng, or about 5.0 ng.

[0072] As described herein, RNA from a biological sample is converted to cDNA, typically using reverse transcriptase in a reverse transcription reaction, prior to the multiplex amplification. In some embodiments, a reverse transcription reaction is performed with the input RNA and a portion of the cDNA from the reverse transcription reaction is used in the multiplex amplification reaction. In some embodiments, substantially all of the cDNA prepared from the input RNA is added to the multiplex amplification reaction. In other embodiments, a portion, such as about 80%, about 75%, about 66%, about 50%, about 33%, or about 25% of the cDNA prepared from the input RNA is added to the multiplex amplification reaction. In other embodiments, about 15%, about 10%, about 8%, about 6%, or about 5% of the cDNA prepared from the input RNA is added to the multiplex amplification reaction.

[0073] In some embodiments, the amount of cDNA from a sample added to the multiplex amplification reaction can be about 0.001 ng to about 5 micrograms. In some embodiments, the amount of cDNA used for multiplex amplification of one or more immune repertoire target sequences can be from about 0.01 ng to about 2 micrograms. In some embodiments, the amount of cDNA used for multiplex amplification of one or more target sequences can be from about 0.1 ng to about 1 microgram or about 1 ng to about 0.5 microgram. In some embodiments, the amount of cDNA used for multiplex amplification of one or more immune repertoire target sequences is about 0.5 ng, about 1 ng, about 5 ng, about 10 ng, about 25 ng, about 50 ng, about 100 ng, about 200 ng, about 250 ng, about 500 ng, about 750 ng, or about 1000 ng. In some embodiments, the amount of cDNA used for multiplex amplification of one or more immune repertoire target sequences is from about 0.01 ng to about 10 ng cDNA, from about 0.05 ng to about 5 ng cDNA, from about 0.1 ng to about 2 ng cDNA, or from about 0.01 ng to about 1 ng cDNA. In some embodiments, the amount of cDNA used for multiplex amplification of one or more immune repertoire target sequences is about 0.005 ng, about 0.01 ng, about 0.05 ng, about 0.1 ng, about 0.2 ng, about 0.5 ng, about 1.0 ng, about 2.0 ng, or about 5.0 ng.

[0074] In some embodiments, mRNA is obtained from a biological sample and converted to cDNA for amplification purposes using conventional methods. Methods and reagents for extracting or isolating nucleic acid from biological samples are well known and commercially available. In some embodiments, RNA extraction from biological samples is performed by any method described herein or otherwise known to those of skill in the art, e.g., methods involving proteinase K tissue digestion and alcohol-based nucleic acid precipitation, treatment with DNAse to digest contaminating DNA, and RNA purification using silica-gel-membrane technology, or any combination thereof. Exemplary methods for RNA extraction from biological samples using commercially available kits including RecoverAll™ Multi-Sample RNA/DNA Workflow (Invitrogen), RecoverAll™ Total Nucleic Acid Isolation Kit (Invitrogen), NucleoSpin® RNA blood (Macherey-Nagel), PAXgene® Blood RNA system, TRI Reagent™ (Invitrogen), PureLink™ RNA Micro Scale kit (Invitrogen), MagMAX™ FFPE DNA/RNA Ultra Kit (Applied Biosystems) ZR RNA MicroPrep™ kit (Zymo Research), RNeasy Micro kit (Qiagen), and ReliaPrep™ RNA Tissue miniPrep system (Promega).

[0075] In some embodiments, the amount of input gDNA for amplification of one or more target sequences can be about 0.1 ng to about 10 micrograms. In some embodiments, the amount of gDNA required for amplification of one or more target sequences can be from about 0.5 ng to about 5 micrograms. In some embodiments, the amount of gDNA required for amplification of one or more target sequences can be from about 1 ng to about 1 microgram or about 10 ng to about 1 microgram. In some embodiments, the amount of gDNA required for amplification of one or more immune repertoire target sequences is from about 10 ng to about 500 ng, about 25 ng to about 400 ng, or from about 50 ng to about 200 ng. In some embodiments, the amount of gDNA required for amplification of one or more target sequences is about 0.5 ng, about 1 ng, about 5 ng, about 10 ng, about 20 ng, about 50 ng, about 100 ng, or about 200 ng. In some embodiments, the amount of gDNA required for amplification of one or more immune repertoire target sequences is about 1 microgram, about 2 micrograms, about 3 micrograms, about 4.0 micrograms, or about 5 micrograms.

[0076] In some embodiments, gDNA is obtained from a biological sample using conventional methods. Methods and reagents for extracting or isolating nucleic acid from biological samples are well known and commercially available. In some embodiments, DNA extraction from biological samples is performed by any method described herein or otherwise known to those of skill in the art, e.g., methods involving proteinase K tissue digestion and alcohol-based nucleic acid precipitation, treatment with RNAse to digest contaminating RNA, and DNA purification using silica-gel-membrane technology, or any combination thereof. Exemplary methods for DNA extraction from biological samples using commercially available kits including Ion AmpliSeg™ Direct FFPE DNA Kit, MagMAX™ FFPE DNA/RNA Ultra Kit, TRI Reagent™ (Invitrogen), PureLink™ Genomic DNA Mini kit (Invitrogen), RecoverAll™ Total Nucleic Acid Isolation Kit (Invitrogen), MagMAX™ DNA Multi-Sample Kit (Invitrogen) and DNA extraction kits from BioChain Institute Inc. (e.g., FFPE Tissue DNA Extraction Kit, Genomic DNA Extraction Kit, Blood and Serum DNA Isolation Kit).

[0077] A sample or biological sample, as used herein, refers to a composition from an individual that contains or may contain cells related to the immune system. Exemplary biological samples, include without limitation, tissue (for example, lymph node, organ tissue, bone marrow), whole blood, synovial fluid, cerebral spinal fluid, tumor biopsy, and other clinical specimens containing cells. The sample may include normal and/or diseased cells and be a fine needle aspirate, fine needle biopsy, core sample, or other sample. In some embodiments, the biological sample may comprise hematopoietic cells, peripheral blood mononuclear cells (PBMCs), B cells, tumor infiltrating lymphocytes (“TILs”) or other lymphocytes. In some embodiments, the sample may be fresh (e.g., not preserved), frozen, or formalin-fixed paraffin-embedded tissue (FFPE). Some samples comprise cancer cells, such as carcinomas, melanomas, sarcomas, lymphomas, myelomas, leukemias, and the like, and the cancer cells may be circulating tumor cells. In some embodiments, the biological sample comprises cfDNA, such as found, for example, in blood or plasma.

[0078] The biological sample can be a mix of tissue or cell types, a preparation of cells enriched for at least one particular category or type of cell, or an isolated population of cells of a particular type or phenotype. Samples can be separated by centrifugation, elutriation, density gradient separation, apheresis, affinity selection, panning, FACS, centrifugation with Hypaque, etc. prior to analysis. Methods for sorting, enriching for, and isolating particular cell types are well-known and can be readily carried out by one of ordinary skill. In some embodiments, the sample may a preparation enriched for B cells.

[0079] In some embodiments, the provided methods and systems include processes for analysis of immune repertoire receptor cDNA or gDNA sequence data and for identification and/or removing PCR or sequencing-derived error(s) from the determined immune receptor sequence.

[0080] In some embodiments, the error correction strategy includes the following steps:
[0081] 1) Align the sequenced rearrangement to a reference database of variable, diversity and joining/constant genes to produce a query sequence/reference sequence pair. Many alignment procedures may be used for this purpose including, for example, IgBLAST, a freely-available tool from the NCBI, and custom computer scripts.
[0082] 2) Realign the reference and query sequences to each other, taking into account the flow order used for sequencing. The flow order provides information that allows one to identify and correct some types of erroneous alignments.
[0083] 3) Identify the borders of the CDR3 region by their characteristic sequence motifs.
[0084] 4) Over the aligned portion of the rearrangement corresponding to the variable gene and joining/constant genes, excluding the CDR3 region, identify indels in the query with respect to the reference and alter the mismatching query base position so that it is consistent with the reference.
[0085] 5) For the CDR3 region, if the CDR3 length is not a multiple of three (indicative of an indel error):
   [0086] (a) Search the CDR3 for the homopolymer stretch having the highest probability of containing a sequence error, based on PHRED score (denoted e).
   [0087] (b) Obtain the probability of error over the entire CDR3 region based on PHRED score (denoted t)
   [0088] (c) If e/t is greater than a defined threshold, edit the homopolymer by either increasing or decreasing the length of the homopolymer by one base such that the CDR3 nucleotide length is a multiple of three.
   [0089] (d) As an alternative to steps a-c, search the CDR3 for the longest homopolymer, and if the length of the homopolymer is above a defined threshold, edit the homopolymer by either increasing or decreasing the length of the homopolymer by one base such that the CDR3 nucleotide length is a multiple of three.

[0090] In some embodiments, methods are provided to identify B cell clones in repertoire data that are robust to PCR and sequencing error. Accordingly, the following describes steps that may be employed in such methods to identify B cell clones in a manner that is robust to PCR and sequencing error. Table 1 a diagram of an exemplary workflow for use in identifying and removing PCR or sequencing-derived errors from immune receptor sequencing data.

[0091] For a set of BCR sequences derived from mRNA or gDNA, where 1) each sequence has been annotated as a productive rearrangement, either natively or after error correction, such as previously described, and 2) each sequence has an identified V gene and CDR3 nucleotide region, in some embodiments, methods include the following:
[0092] 1) Identify and exclude chimeric sequences. For each unique CDR3 nucleotide sequence present in the dataset, tally the number of reads having that CDR3 nucleotide sequence and any of the possible V genes. Any V gene-CDR3 combination making up less than 10% of total reads for that CDR3 nucleotide sequence is flagged as a chimera and eliminated from downstream analyses. As an example, for the sequences below having the same CDR3 nucleotide sequence, e.g., the sequences having TRBV3 and TRBV6 paired with CDR3nt sequence AATTGGT will be flagged as chimeric.

| V gene | CDR3 nt | Read counts |
|---|---|---|
| TRBV2 | AATTGGT | 1000 |
| TRBV3 | AATTGGT | 10 |
| TRBV6 | AATTGGT | 3 |

[0093] 2) Identify and exclude sequences containing simple indel errors. For each read in the dataset, obtain the homopolymer-collapsed representation of the CDR3 sequence of that read. For each set of reads having the same V gene and collapsed-CDR3 combination, tally the number of occurrences of each non-collapsed CDR3 nucleotide sequence. Any non-collapsed CDR3 sequence making up<10% of total reads for that read set is flagged as having a simple homopolymer error. As an example, three different V gene-CDR3 nucleotide sequences are presented that are identical after homopolymer collapsing of the CDR3 nucleotide sequence. The two less frequent V gene-CDR3 combinations make up<10% of total reads for the read set and will be flagged as containing a simple indel error. For example:

| | | Homopolymer | Read |
|---|---|---|---|
| V gene | CDR3 nt | collapsed CDR3 nt | counts |
| TRBV2 | AATTGGT | ATGT | 1000 |
| TRBV2 | AAATGGT | ATGT | 10 |
| TRBV2 | AAAATTTGGT | ATGT | 3 |

[0094] 3) Identify and exclude singleton reads. For each read in the dataset, tally the number of times that the exact read sequence is found in the dataset. Reads that appear only once in the dataset will be flagged as singleton reads.
[0095] 4) Identify and exclude truncated reads. For each read in the dataset, determine whether the read possesses an annotated V gene FR1, CDR1, FR2, CDR2, and FR3 region, as indicated by the IgBLAST alignment of the read to the IgBLAST reference V gene set. Reads that do not possess the above regions are flagged as truncated if the region(s) is expected based on the particular V gene primer used for amplification.
[0096] 5) Identify and exclude rearrangements lacking bidirectional support. For each read in the dataset, obtain the V gene and CDR3 sequence of the read as well as the strand orientation of the read (plus or minus strand). For each V gene-CDR3 combination in the dataset, tally the number of plus and minus strand reads having that V gene-CDR3nt combination. V gene-CDR3nt combinations that are only present in reads of one orientation will be deemed to be a spurious. All reads having a spurious V gene-CDR3nt combination will be flagged as lacking bidirectional support.
[0097] 6) For genes that have not been flagged, perform stepwise clustering based on CDR3 nucleotide similarity. Separate the sequences into groups based on the V gene identity of the read, excluding allele information (v-gene groups). For each group:
   [0098] a. Arrange reads in each group into clusters using cd-hit-est and the following parameters:
   [0099] cd-hit-est vgene_groups.fa-o clustered_vgene_groups.cdhit-T 24-d 0-M 100000-B 0-r 0-g 1-S 0-U 2-uL 0.05-n 10−17. (The freely available software program cd-hit-est clusters a nucleotide dataset into clusters that meet a user-defined similarity threshold. (For code and instructions on cd-hit-est, see github.com/weizhongli/cdhit/wild/3.-User %27s-Guide#CDHITEST).
   [0100] Where vgene_groups.fa is a fasta format file of the CDR3 nucleotide regions of sequences having the same V gene and clustered_vgenegroups.cdhit is the output, containing the subdivided sequences.
   [0101] b. Assign each sequence in a cluster the same clone ID, used to denote that members of the subgroup are believed to represent the same B cell clone.
   [0102] c. Chose a representative sequence for each cluster, such that the representative sequence is the sequence that appears the greatest number of times, or, in cases of a tie, is randomly chosen.
   [0103] d. Merge all other reads in the cluster into the representative sequence such that the number of reads for the representative sequence is increased according to the number of reads for the merged sequences.
   [0104] e. Compare the representative sequences within a v-gene group to each other on the basis of hamming distance. If a representative sequence is within a hamming distance of 1 to a representative sequence that is >50 times more abundant, merge that sequence into the more common representative sequence. If a representative sequence is within a hamming distance of 2 to a representative sequence that is >10000 times more abundant, merge that sequence into the more common representative sequence.
   [0105] f. Identify complex sequence errors. Homopolymer-collapse the representative sequences within each V gene group, then compare to each other using Levenshtein distances. If a representative sequence is within a Levenshtein distance of 1 to a representative sequence that is >50 times more abundant, merge that sequence into the more common representative sequence.
   [0106] g. Identify CDR3 misannotation errors. Homopolymer-collapse the representative sequences within each V gene group, then perform a pairwise comparison of each homopolymer-collapsed sequence. For each pair of sequences, determine whether one sequence is a subset of the other sequence. If so, merge the less abundant sequence into the more abundant sequence if the more abundance sequence is >500 fold more abundant.
[0107] 7) Report cluster representatives to user.

[0108] In some embodiments, step 6 of the above workflow separates the rearrangement sequences into groups based on the V-gene identity (excluding allele information), and the CDR3 nucleotide length. In other embodiments, the J-gene identity and/or isotype identity is also used as part of the grouping criteria. Accordingly, in some embodiments, step 6 of the above workflow includes the following steps:
[0109] a. Arrange reads in each group into clusters using cd-hit-est and the following parameters:
   [0110] cd-hit-est vgene_groups.fa-o clustered_vgene_groups.cdhit-T 24-19-d 0-M 100000-B 0-r 0-g 1-S 15-U 2-uL 0.05-n 9.
   [0111] Where vgene_groups.fa is a fasta format file of the sequenced portion of the VDJ rearrangement.
   [0112] In some embodiments, the full sequence of the VDJ is considered for clustering as somatic hypermutation may occur throughout the VDJ region.
[0113] b. Assign each sequence in a cluster the same clone ID, used to denote that members of the subgroup are believed to represent the same B cell clone.
[0114] c. Chose a representative sequence for each cluster, such that the representative sequence is the sequence that appears the greatest number of times, or, in cases of a tie, is randomly chosen.
[0115] d. Merge all other reads in the cluster into the representative sequence such that the number of reads for the representative sequence is increased according to the number of reads for the merged sequences.
[0116] e. Compare the representative sequences within a v-gene group to each other on the basis of hamming distance. If a representative sequence is within a hamming distance of 1 to a representative sequence that is >50 times more abundant, merge that sequence into the more common representative sequence. If a representative sequence is within a hamming distance of 2 to a representative sequence that is >10000 times more abundant, merge that sequence into the more common representative sequence. In some embodiments, fold thresholds of >50/3 and >10000/3, among others are used to merge sequences of hamming distances 1 or 2, respectively. Reducing the fold thresholds can be useful when comparing sequences of the entire VDJ region rather than sequences of only the CDR3 region as the longer sequence has a greater chance of accumulating amplification and/or sequencing errors.
[0117] f. Identify complex sequence errors. Homopolymer-collapse the representative sequences within each V gene group, then compare to each other using Levenshtein distances. If a representative sequence is within a Levenshtein distance of 1 to a representative sequence that is >50 times more abundant, merge that sequence into the more common representative sequence.
[0118] g. Identify CDR3 misannotation errors. Homopolymer-collapse the representative sequences within each V gene group, then perform a pairwise comparison of each homopolymer-collapsed sequence. For each pair of sequences, determine whether one sequence is a subset of the other sequence. If so, merge the less abundant sequence into the more abundant sequence if the more abundance sequence is >500 fold more abundant.

[0119] In some embodiments, the provided workflows are not limited to the frequency ratio thresholds listed in the various steps, and other frequency ratio thresholds may be substituted for the representative frequency ratio thresholds included above. The frequency ratio refers to a ratio of the abundance value of the more common representative sequence to the abundance value of the less common representative sequence. The frequency ratio threshold gives the threshold at which the less common representative sequence is merged into the more common representative sequence. For example, in some embodiments, comparing the representative sequences within a v-gene group to each other on the basis of hamming distance may use a frequency ratio threshold other than those listed in step (e) above. For example and without limitation, frequency ratio thresholds of 1000, 5000, 20,000, etc may be used if a representative sequence is within a hamming distance of 2 to a representative sequence. For example and without limitation, frequency ratio thresholds of 20, 100, 200, etc may be used if a representative sequence is within a hamming distance of 1 to a representative sequence. The frequency ratio thresholds provided are representative of the general process of labeling the more abundant sequence of a similar pair as a correct sequence.

[0120] Similarly, when comparing the frequencies of two sequences at other steps in the workflows, eg, step (1), step (2), step (6f) and step (6g), frequency ratio thresholds other than those listed in the step above may be used.

[0121] As used herein, the term “homopolymer-collapsed sequence” is intended to represent a sequence where repeated bases are collapsed to a single base representative.

[0122] As used herein, the terms “clone,” “clonotype,” “lineage,” or “rearrangement” are intended to describe a unique V gene nucleotide combination for an immune receptor, such as a BCR. For example, a unique V gene-CDR3 nucleotide combination.

[0123] As used herein, the term “productive reads” refers to a BCR sequence reads that have no stop codon and have in-frame variable gene and joining gene segments. Productive reads are biologically plausible in coding for a polypeptide.

[0124] As used herein, “chimeras” or chimeric sequences” refer to artefactual sequences that arise from template switching during target amplification, such as PCR. Chimeras typically present as a CDR3 sequence grafted onto an unrelated V gene, resulting in a CDR3 sequence that is associated with multiple V genes within a dataset. The chimeric sequence is usually far less abundant than the true sequence in the dataset.

[0125] As used herein, the term “indel” refers to an insertion and/or deletion of one or more nucleotide bases in a nucleic acid sequence. In coding regions of a nucleic acid sequence, unless the length of an indel is a multiple of 3, it will produce a frameshift when the sequence is translated. As used herein, “simple indel errors” are errors that do not alter the homopolymer-collapsed representation of the sequence. As used herein, “complex indel errors” are indel sequencing errors that alter the homopolymer-collapsed representation of the sequence and include, without limitation, errors that eliminate a homopolymer, insert a homopolymer into the sequence, or create a dyslexic-type error.

[0126] As used herein, “singleton reads” refer to sequence reads whose indel-corrected sequence appears only once in a dataset. Typically, singleton reads are enriched for reads containing a PCR or sequencing error.

[0127] As used herein, “truncated reads” refer to immune receptor sequence reads that are missing annotated V gene regions. For example, truncated reads include, without limitation, sequence reads that are missing annotated BCR V gene FR1, CDR1, FR2, CDR2, or FR3 regions. Such reads typically are missing a portion of the V gene sequence due to quality trimming Truncated reads can give rise to artifacts if the truncation leads one to misidentify the V gene.

[0128] In the context of identified V gene-CDR3 sequences (clonotypes), “bidirectional support” indicates that a particular V gene-CDR3 sequence is found in at least one read that maps to the plus strand (proceeding from the V gene to constant gene) and at least one reads that maps to the minus strand (proceeding form the constant gene to the V gene). Systematic sequencing errors often lead to identification of V gene-CDR3 sequences having unidirectional support.

[0129] For a set of sequences that have been grouped according to a predetermined sequence similarity threshold to account for variation due to PCR or sequencing error, the “cluster representative” is the sequence that is chosen as most likely to be error free. This is typically the most abundant sequence.

[0130] As used herein, “IgBLAST annotation error” refers to rare events where the border of the CDR3 is identified to be in an incorrect adjacent position. These events typically add three bases to the 5′ or 3′ end of a CDR3 nucleotide sequence.

[0131] For two sequences of equal length, the “Hamming distance” is the number of positions at which the corresponding bases or amino acids are different. For any two sequences, the “Levenshtein distance” or the “edit distance” is the number of single base or amino acid edits required to make one nucleotide or amino acid sequence into another nucleotide or amino acid sequence.

[0132] In some embodiments in which J gene-directed primers are used in amplification of the immune receptor sequences, for example multiplex amplification with primers directed to V gene FR3 regions and primers directed to J genes, raw sequence reads derived from the assay undergo a J gene sequence inference process before any downstream analysis. In this process, the beginning and end of raw read sequences are interrogated for the presence of characteristic sequences of 10-30 nucleotides corresponding to the portion of the J gene sequences expected to exist after amplification with the J primer and any subsequent manipulation or processing (for example, digestion) of the amplicon termini prior to sequencing. The characteristic nucleotide sequences permit one to infer the sequence of the J primer, as well as the remaining portion of the J gene that was targeted since the sequence of each J gene is known. To complete the J gene sequence inference process, the inferred J gene sequence is added to the raw read to create an extended read that then spans the entire J gene. The extended read then contains the entire J gene sequence, the entire sequence of the CDR3 region, and at least a portion of the V gene sequence, which will be reported after downstream analysis. The portion of V gene sequence in the extended read will depend on the V gene-directed primers used for the multiplex amplification, for example, FR3-, or FR2-directed primers.

[0133] Use of V gene FR3 and J gene primers to amplify expressed immune receptor sequences or rearranged immune receptor gDNA sequences yields a minimum length amplicon (for example, about 60-100 or about 80 nucleotides in length) while still producing data that allows for reporting of the entire CDR3 region. With the expectation of short amplicon length, reads of amplicons <100 nucleotides in length are not eliminated as low-quality and/or off target products during the sequence analysis workflow. However, the explicit search for the expected J gene sequences in the raw reads allows one to eliminate amplicons deriving from off-target amplifications by the J gene primers. In addition, this short amplicon length improves the performance of the assay on highly degraded template material, such as that derived from an FFPE or cfDNA sample.

[0134] In some embodiments, provided methods comprise sequencing an immune receptor library and subjecting the obtained sequence data to error identification and correction processes to generate rescued productive reads, and identifying productive and rescued productive sequence reads. In some embodiments, provided methods comprise sequencing an immune receptor library and subjecting the obtained sequence dataset to error identification and correction processes, identifying productive and rescued productive sequence reads, and grouping the sequence reads by clonotype to identify immune receptor clonotypes in the library.

[0135] In some embodiments, provided methods comprise sequencing a rearranged immune receptor DNA library and subjecting the obtained sequence data to error identification and correction processes for the V gene portions to generate rescued productive reads, and identifying productive, rescued productive, and unproductive sequence reads. In some embodiments, provided methods comprise sequencing a rearranged immune receptor DNA library and subjecting the obtained sequence dataset to error identification and correction processes for the V gene portions, identifying productive, rescued productive, and unproductive sequence reads, and grouping the sequence reads by clonotype to identify immune receptor clonotypes in the library. In some embodiments, both productive and unproductive sequence reads of rearranged immune receptor DNA are separately reported.

[0136] In some embodiments, the provided error identification and correction workflow is used for identifying and resolving PCR or sequencing-derived errors that lead to a sequence read being identified as from an unproductive rearrangement. In some embodiments, the provided error identification and correction workflow is applied to immune receptor sequence data generated from a sequencing platform in which indel or other frameshift-causing errors occur while generating the sequence data.

[0137] In some embodiments, the provided error identification and correction workflow is applied to sequence data generated by an Ion Torrent sequencing platform. In some embodiments, the provided error identification and correction workflow is applied to sequence data generated by Roche 454 Life Sciences sequencing platforms, PacBio sequencing platforms, and Oxford Nanopore sequencing platforms.

[0138] In some embodiments, the BCR repertoire analysis workflow includes an additional last step to identify clonal lineages in the sample. A clonal lineage represents a set of B cell clones (e.g., identified as having unique VDJ sequences) that derive from a common VDJ rearrangement but differ owing to somatic hypermutation and/or class switch recombination. It is generally assumed that members of a clonal lineage may be more likely to target the same antigen than members of different clonal lineages.

[0139] In some embodiments, the process of clonal lineage identification includes using a set of BCR clones (e.g., IgH clones) identified (for example as described herein) to perform the following:
[0140] 1. Separate the clone sequences into groups where group members share the same variable gene (excluding allele information), the same CDR3 nucleotide length, and the same joining gene (excluding allele information). In some embodiments the above J-gene criterion may be omitted.
[0141] 2. Arrange the clone sequences in each group into clusters based on the CDR3 nucleotide similarity of the clone sequences. Thresholds for CDR3 nucleotide similarity are about 0.70 to about 0.99. In some embodiments, the threshold for CDR3 nucleotide similarity is between about 0.80 to about 0.99. In some embodiments, the threshold for CDR3 nucleotide similarity is between about 0.80 to about 0.90. In certain embodiments, the threshold for CDR3 nucleotide similarity is about 0.80, 0.81, 0.82, 0.83, 0.84, 0.85, 0.86, 0.87, 0.88, 0.89, 0.90, 0.91, 0.92, 0.93, 0.94, 0.95, 0.96, 0.97, 0.98, or 0.99.
   [0142] a. In some embodiments, the clustering is performed using cd-hit-est as described: cd-hit-est vgene_groups.fa-o clustered_vgene_groups.cdhit-T 24-19-d 0-M 100000-B 0-r 0-g 1-S 0-c 0.85-n 5, where vgene_groups.fa consists of the set of CDR3 nucleotide sequences of each clone within a group. Clones within the same cluster are considered members of the same clonal lineage.
[0143] b. In some instances, somatic hypermutation may be extensive enough that the described clustering criteria may not group all clonal lineage members. For such cases, in some embodiments, an additional step is performed to merge clusters identified in (a). The additional step consists of searching for instances of shared somatic hypermutation-derived mutations in the variable gene between clonal lineages, then merging clonal lineages if the fraction and/or number of shared mutations is above a certain threshold. Variable gene mutations are identified by comparison of the variable gene sequence to the best matching variable gene sequence in the IMGT database, as described. In some embodiments, the threshold for number of shared mutations is 2 or more. In some embodiments, the threshold for number of shared mutations is 3 or more. In other embodiments, the threshold for number of shared mutations is 4, 5, 6, 7, 8, 9, 10 or more. In some embodiments, the fraction of shared mutations is about to about 0.95. In some embodiments, the fraction of shared mutations is about or about 0.85. In other embodiments, the fraction of shared mutations is about 0.2, 0.25, 0.3, 0.35, 0.4, 0.5, 0.6, 0.7, 0.8, 0.9, or 0.95.

[0144] In some instances, a variable gene allele may be identified that is not represented in the IMGT database. In such instances, alignment to the IMGT database will indicate a mismatch that is not derived from somatic hypermutation. To avoid noise caused by such unannotated genetic variants, in some embodiments, an initial step is performed before (b) where one identifies all putative novel variable gene alleles in a sample, noting each position that differs from reference. In some embodiments, such positions are then excluded from consideration in the analysis described in (b). Methods for the identification of novel alleles from immune repertoire sequencing data have been described, for example, by Gadala-Maria et al. (2015) Proc. Natl. Acad. Sci. USA 112: E862-E870 and PCT Application Publication No. WO 2018/136562.

[0145] At the end of this clonal lineage identification process, each clone has been assigned to a clonal lineage. BCR repertoire features such as diversity, evenness, and convergence may be calculated with the clonal lineage as the unit of analysis. In some embodiments, clonal lineages features, such as the number of clones belonging to a lineage, the isotypes of those clones, the maximum and minimum frequency of the clones in a lineage, the maximum and minimum variable gene somatic hypermutation in a lineage, and others, are calculated and reported to the user.

[0146] In the absence of somatic hypermutation, BCR convergence may be calculated as the frequency of clones that are identical, or functionally identical, in amino acid sequence but different in nucleotide sequence. These represent clones that independently underwent VDJ recombination and generally assumed to have proliferated in response to a common antigen. However, somatic hypermutation can create distinct VDJ sequences that do not represent B cells that independently underwent VDJ recombination. To account for this a definition of convergence is used that takes into account the clonal lineage identification. For this purpose, “BCR convergence” is defined as the frequency of B cell clones that are members of different clonal lineages, as determined above, but are similar or identical in amino acid sequence. In some embodiments, two IGH rearrangements are considered convergent if they are assigned to separate clonal lineages but have the same variable gene (excluding allele information) and the same or similar CDR3 amino acid sequence. In other embodiments where sequencing covers all three CDR domains of the IGH chain, two IGH rearrangements may be considered convergent if they are assigned to separate clonal lineages but have the same variable gene (excluding allele information) and the same or similar CDR1, 2 and 3 amino acid sequence. In some embodiments, similar CDR amino acid sequences are within a Hamming or Levenshtein edit distance of 1. In other embodiments, similar CDR amino acid sequences are within a Hamming or Levenshtein edit distance of 2.

[0147] Accordingly, in some embodiments, functionally equivalent B cells are identified by searching for BCR clones having the same variable gene and CDR amino acid sequences that are within a Hamming or Levenshtein edit distance of 1 or 2. In some embodiments the program cd-hit may be used to identify clones having similar but functionally equivalent amino acid sequences. (For code and information on the program cd-hit, see github.com/weizhongli/cdhit/wild/3.-User %27s-Guide) In some embodiments cd-hit is run using the following command
[0148] cd-hit vgene_groups.fa-o clustered_vgene_groups.cdhit-T 24-15-d 0-M 100000-B 0-g 1-S 1-U 1-n 5, where vgene_groups.fa consists of the set of CDR3 amino acid sequences of clones having the same variable gene. Clones within the same cluster are considered to be functionally equivalent.
   In some embodiments, the value for the parameter -S may be 0, 1, 2, or 3. In some embodiments, the value for the parameter -U may be 0, 1, 2, or 3.
   In some embodiments, vgene_groups.fa consists of the set of CDR 1, 2 and 3 amino acid sequences of clones having the same variable gene. In some embodiments, vgene_groups.fa consists of the set of clones having both the same variable gene and the same CDR3 length.

[0149] In some embodiments, provided sequence analysis workflows include a downsampling analysis. For immune repertoire sequencing and subsequent analysis, use of downsampling analysis can help, for example, to eliminate variability owing to differences in sequencing depth across an assay. For example, an exemplary downsampling analysis for use with RNA or cDNA sequencing and analysis workflows applies the following procedure to the data: a) starting with the total set of productive+rescued productive reads, sequence reads are randomly removed down to one of several fixed read depths and b) this subset of reads is used to perform all downstream calculations (for example, clonotyping and calculation of secondary repertoire features including without limitation evenness, convergence, diversity, number and identity of clones detected, and clonal lineages).

[0150] In some embodiments, downsampling analysis identifies the point at which a particular sample is sequenced to saturation, for example, a point at which additional reads do not identify additional clones or lineages or add additional diversity to the detected repertoire. In some embodiments, downsampling allows the refining of sequencing depth or multiplexing among or between assays with similar sample types.

[0151] In some embodiments, the set of variable gene alleles detected by the assay methods and compositions provided may be used for de novo identification of haplotype groups within human populations. In particular embodiments, provided assay methods and compositions which include use of a plurality of V gene-specific primers and at least one C gene specific primer to amplify IgH CDR 1, 2, and 3 nucleotide sequences may be used to identify the IgH haplotype of a subject's BCR repertoire. For example, in some embodiments, methods and compositions provided which use at least set of primers comprising a plurality of V gene FR1 primers selected from Table 3 and at least one C gene primer selected from Tables 6-10 may be used to identify the IgH haplotype of a subject's BCR repertoire. Methods for identification of TCR haplotype groups are described in PCT Application No. PCT/US2019/023731, filed Mar. 22, 2019, the entirety of which is incorporated herein by reference, and may similarly be used in conjunction with the methods and compositions provided herein to identify IgH haplotype groups. In some embodiments, the set of variable gene alleles detected by amplifying and sequencing IgH CDR 1, 2, and 3 nucleotide sequences may be used to assign a sample to one of several pre-existing haplotype groups as part of a larger procedure for predicting the risk of autoimmune disease or adverse events following an immunotherapy. Methods for assigning a sample to a haplotype group in a procedure for predicting risk of autoimmune disease or adverse events following an immunotherapy are also described in PCT Application No. PCT/US2019/023731, filed Mar. 22, 2019 and incorporated herein by reference, and may similarly be used in conjunction with the methods and compositions provided herein to assign a sample to a IgH haplotype group, for example, for predicting such risks. In some embodiments, the IgH CDR 1, 2, 3 sequence data obtained using the provided assay methods and compositions may be used to infer phased IgH locus haplotypes (for example, Kidd et al. (2012) J. Immunol. 188(3): 1333-1340).

[0152] In some embodiments, the method comprises hybridizing a plurality of V gene gene-specific primers and a plurality of J gene-specific primers to a cDNA molecule, extending a first primer (e.g., a V gene-specific primer) of the primer pair, denaturing the extended first primer from the cDNA molecule, hybridizing to the extended first primer product, a second primer (e.g., a J gene-specific primer) of the primer pair and extending the second primer, digesting the target-specific primer pairs to generate a plurality of target amplicons. In some embodiments, adapters are ligated to the ends of the target amplicons prior to performing a nick translation reaction to generate a plurality of target amplicons suitable for nucleic acid sequencing. In some embodiments, at least one of the ligated adapters includes at least one barcode sequence. In some embodiments, each adapter ligated to the ends of the target amplicons includes a barcode sequence. In some embodiments, the one or more target amplicons can be amplified using bridge amplification, emulsion PCR or isothermal amplification to generate a plurality of clonal templates suitable for nucleic acid sequencing.

[0153] In some embodiments, provided methods comprise preparation and formation of a plurality of immune receptor-specific amplicons. In some embodiments, the method comprises hybridizing a plurality of V gene gene-specific primers and a plurality of J gene-specific primers to a gDNA molecule, extending a first primer (eg, a V gene-specific primer) of the primer pair, denaturing the extended first primer from the gDNA molecule, hybridizing to the extended first primer product, a second primer (e.g., a J gene-specific primer) of the primer pair and extending the second primer, digesting the target-specific primer pairs to generate a plurality of target amplicons. In some embodiments, adapters are ligated to the ends of the target amplicons prior to performing a nick translation reaction to generate a plurality of target amplicons suitable for nucleic acid sequencing. In some embodiments, at least one of the ligated adapters includes at least one barcode sequence. In some embodiments, each adapter ligated to the ends of the target amplicons includes a barcode sequence. In some embodiments, the one or more target amplicons can be amplified using bridge amplification or emulsion PCR to generate a plurality of clonal templates suitable for nucleic acid sequencing.

[0154] In some embodiments, the disclosure provides methods for sequencing target amplicons and processing the sequence data to identify productive immune receptor rearrangements expressed in the biological sample from which the cDNA was derived. In other embodiments, the disclosure provides methods for sequencing target amplicons and processing the sequence data to identify productive immune receptor gene rearrangements gDNA from a biological sample. In embodiments in which J gene-directed primers are used to amplify the expressed immune receptor sequences or rearranged immune receptor gDNA sequences, processing the sequence data includes inferring the nucleotide sequence of the J gene primer used for amplification as well as the remaining portion of the J gene that was targeted, as described herein. In some embodiments, processing the sequence data includes performing provided error identification and correction steps to generate rescued productive sequences. In some embodiments, use of the provided error identification and correction workflow can result in a combination of productive reads and rescued productive reads being at least 50% of the sequencing reads for an immune receptor cDNA or gDNA sample. In some embodiments, use of the provided error identification and correction workflow can result in a combination of productive reads and rescued productive reads being at least 60%, at least 70%, at least 80%, at least 90%, or at least 95% of the sequencing reads for an immune receptor cDNA or gDNA sample. In some embodiments, use of the provided error identification and correction workflow can result in a combination of productive reads and rescued productive reads being about 50-60%, about 60-70%, about 70-80%, about 80-90%, about 50-80%, or about 60-90% of the sequencing reads for an immune receptor cDNA or gDNA sample. In some embodiments, use of the provided error identification and correction workflow can result in a combination of productive reads and rescued productive reads averaging about 50%, about 55%, about 60%, about 65%, about 70%, about 75%, about 80%, about 85%, about 90% of the sequencing reads for an immune receptor cDNA or gDNA sample.

[0155] With particular samples, the provided error identification and correction workflow can result in a combination of productive reads and rescued productive reads being less than 50% of the sequencing reads for an immune receptor cDNA or gDNA sample when particular samples are used. Such samples include, for example, those in which the RNA or gDNA is highly degraded such as FFPE samples and cfDNA samples, and those in which the number of target immune cells is very low such as, for example, samples with very low B cell count or samples from subjects experiencing severe leukopenia. Accordingly, in some embodiments, use of the provided error identification and correction workflow can result in a combination of productive reads and rescued productive reads being about 30-50%, about 40-50%, about 30-40%, about 40-60%, at least 30%, or at least 40% of the sequencing reads for an immune receptor cDNA or gDNA sample.

[0156] In certain embodiments, methods of the invention comprise the use of target immune receptor primer sets wherein the primers are directed to sequences of the same target immune receptor gene, e.g, BCR (immunoglobulin) genes. In some embodiments the immune receptor is an antibody receptor selected from the group consisting of heavy chain alpha, heavy chain delta, heavy chain epsilon, heavy chain gamma, heavy chain mu, light chain kappa, and light chain lambda.

[0157] In certain embodiments, provided is a method for amplification of expression nucleic acid sequences of a BCR repertoire in a sample, comprising performing a multiplex amplification reaction to amplify BCR nucleic acid template molecules having a constant portion and a variable portion using at least one set of: i) a plurality of V gene primers directed to a majority of different V genes of at least one BCR coding sequence comprising at least a portion of a leader or framework region within the V gene, and ii) one or more C gene primers directed to at least a portion of the respective target constant gene of the BCR coding sequence, wherein each set of i) and ii) primers directed to the same target immune receptor sequences is selected from the group consisting of IgH, IgLkappa, and IgLlambda, and wherein performing amplification using each set results in amplicons representing the entire repertoire of the respective immune receptor in the sample; thereby generating immune receptor amplicons comprising the repertoire of the BCR. In particular embodiments the one or more plurality of V gene primers of i) are directed to sequences over about an 80 nucleotide portion of the framework region. In more particular embodiments the one or more plurality of V gene primers of i) are directed to sequences over about a 50 nucleotide portion of the framework region.

[0158] In certain embodiments, provided is a method for amplification of expression nucleic acid sequences of a BCR repertoire in a sample, comprising performing a multiplex amplification reaction to amplify BCR nucleic acid template molecules having a J gene portion and a V gene portion using at least one set of: i) a plurality of V gene primers directed to a majority of different V genes of a BCR coding sequence comprising at least a portion of a leader or framework region within the V gene, and ii) a plurality of J gene primers directed to a majority of different J genes of the respective target immune receptor coding sequence, wherein each set of i) and ii) primers directed to the same target immune receptor sequences is selected from the group consisting of IgH, IgLkappa and IgLlambda, and wherein performing amplification using each set results in amplicons representing the entire repertoire of the respective immune receptor in the sample; thereby generating amplicons comprising the repertoire of the BCR. In particular embodiments the one or more plurality of V gene primers of i) are directed to sequences over about an 80 nucleotide portion of the framework region. In more particular embodiments the one or more plurality of V gene primers of i) are directed to sequences over about a 50 nucleotide portion of the framework region. In particular embodiments the one or more plurality of J gene primers of ii) are directed to sequences over about a 50 nucleotide portion of the J gene. In more particular embodiments the one or more plurality of J gene primers of ii) are directed to sequences over about a 30 nucleotide portion of the J gene. In certain embodiments, the one or more plurality of J gene primers of ii) are directed to sequences completely within the J gene.

[0159] In certain embodiments, provided is a method for amplification of expression nucleic acid or genomic DNA sequences of a BCR repertoire in a sample, comprising performing a multiplex amplification reaction to amplify BCR nucleic acid template molecules having a J gene portion and a V gene portion using at least one set of: i) a plurality of V gene primers directed to a majority of different V genes of at least one BCR coding sequence comprising at least a portion of framework region 3 (FR3) within the V gene, and ii) a plurality of J gene primers directed to a majority of different J genes of the respective target BCR coding sequence, wherein each set of i) and ii) primers directed to the same target immune receptor sequences is selected from the group consisting of IgH, IgLkappa, and IgLlambda, and wherein performing amplification using each set results in amplicons representing the entire repertoire of the respective immune receptor in the sample; thereby generating BCR amplicons comprising the repertoire of the BCR. In particular embodiments the one or more plurality of V gene primers of i) are directed to sequences over about an 80 nucleotide portion of the framework region. In more particular embodiments the one or more plurality of V gene primers of i) are directed to sequences over about a 50 nucleotide portion of the framework region. In more particular embodiments the one or more plurality of V gene primers of i) are directed to sequences over about a 40 to about a 60 nucleotide portion of the framework region. In some embodiments the one or more plurality of V gene primers of i) anneal to at least a portion of the framework 3 region of the template molecules. In certain embodiments the plurality of J gene primers of ii) comprises at least two primers that anneal to at least a portion of the J gene portion of the template molecules. In some embodiments the plurality of J gene primers of ii) comprises at least 2 to about 8 primers that anneal to at least a portion of the J gene portion of the template molecules. In some embodiments the plurality of J gene primers of ii) comprises about 4 primers that anneal to at least a portion of the J gene portion of the template molecules. In some embodiments the plurality of J gene primers of ii) comprises about 3 to about 6 primers that anneal to at least a portion of the J gene portion of the template molecules. In particular embodiments at least one set of the generated amplicons includes complementarity determining region CDR3 of a BCR expression sequence. In some embodiments the amplicons are about 60 to about 160 nucleotides in length, about 70 to about 100 nucleotides in length, about 100 to about 120 nucleotides in length, at least about 70 to about 90 nucleotides in length, about 80 to about 90 nucleotides in length, or about 80 nucleotides in length. In some embodiments the nucleic acid template used in methods is cDNA produced by reverse transcribing nucleic acid molecules extracted from a biological sample.

[0160] In certain embodiments, methods are provided for providing sequence of the BCR repertoire in a sample, comprising performing a multiplex amplification reaction to amplify BCR nucleic acid template molecules having a J gene portion and a V gene portion using at least one set of primers comprising i) a plurality of V gene primers directed to a majority of different V genes of at least one BCR coding sequence comprising at least a portion of framework region 3 (FR3) within the V gene, and ii) a plurality of J gene primers directed to a majority of different J genes of the respective target immune receptor coding sequence, wherein each set of i) and ii) primers directed to the same target immune receptor sequences is selected from the group consisting of IgH, IgLkappa, and IgLlambda, thereby generating BCR amplicon molecules. Sequencing of resulting BCR amplicon molecules is then performed and the sequences of the immune receptor amplicon molecules determined thereby provides sequence of the BCR repertoire in the sample. In some embodiments, determining the sequence of the BCR amplicon molecules includes obtaining initial sequence reads, aligning the initial sequence read to a reference sequence, identifying productive reads, correcting one or more indel errors to generate rescued productive sequence reads, and determining the sequences of the resulting immune receptor molecules. In particular embodiments, determining the sequence of the BCR amplicon molecules includes obtaining initial sequence reads, adding the inferred J gene sequence to the sequence read to create an extended sequence read, aligning the extended sequence read to a reference sequence and identifying productive reads, correcting one or more indel errors to generate rescued productive sequence reads, and determining the sequences of the resulting BCR molecules. In particular embodiments the combination of productive reads and rescued productive reads is at least 50%, at least 60% at least 70% or at least 75% of the sequencing reads for the BCRs. In additional embodiments the method further comprises sequence read clustering and BCR clonotype reporting. In some embodiments, the sequences of the identified BCR repertoire are compared to a contemporaneous or current version of the IMGT database and the sequence of at least one allelic variant absent from that IMGT database is identified. In some embodiments the sequence read lengths are about 60 to about 185 nucleotides, depending in part on inclusion of any barcode sequence in the read length. In some embodiments the average sequence read length is between 90 and 120 nucleotides, is between 70 and 90 nucleotides, or is between about 75 and about 85 nucleotides, or is about 80 nucleotides. In certain embodiments at least one set of the sequenced amplicons includes complementarity determining region CDR3 of a BCR expression sequence.

[0161] In particular embodiments, methods provided utilize target BCR primer sets comprising V gene primers wherein the one or more of a plurality of V gene primers are directed to sequences over an FR3 region about 50 nucleotides in length. In other embodiments the one or more of a plurality of V gene primers are directed to sequences over an FR3 region about 70 nucleotides in length. In other particular embodiments the one or more of a plurality of V gene primers are directed to sequences over an FR3 region about 40 to about 60 nucleotides in length. In certain embodiments a target BCR primer set comprises V gene primers comprising about 50 to about 85 different FR3-directed primers. In certain embodiments a target BCR primer set comprises V gene primers comprising about 55 to about 80 different FR3-directed primers. In some embodiments, a target immune receptor primer set comprises V gene primers comprising about 62 to about 75 different FR3-directed primers. In some embodiments, a target BCR primer set comprises V gene primers comprising about 65, 66, 67, 68, 69, or 70 different FR3-directed primers. In some embodiments the target BCR primer set comprises a plurality of J gene primers. In some embodiments a target BCR primer set comprises at least two J gene primers wherein each is directed to at least a portion of a J gene within target polynucleotides. In some embodiments a target BCR primer set comprises 2 to about 8 J gene primers wherein each is directed to at least a portion of a J gene within target polynucleotides. In some embodiments a target BCR primer set comprises about 3 to about 6 different J gene primers wherein each is directed to at least a portion of a J gene within target polynucleotides. In some embodiments a target BCR primer set comprises about 2, 3, 4, 5, 6, 7 or 8 different J gene primers. In particular embodiments a target immune receptor primer set comprises about 4 J gene primers wherein each is directed to at least a portion of a J gene within target polynucleotides.

[0162] In particular embodiments, methods of the invention comprise the use of at least one set of primers comprising V gene primers of BCR IgH coding sequence and J gene primers of BCR IgH coding sequence i), and V gene primers of BCR IgLlambda coding sequence and J gene primers of BCR IgLlambda coding sequence ii), and V gene primers of BCR IgIgLkappa coding sequence and J gene primers of BCR IgLkappa coding sequence iii), and optionally Cint sequence primers and KDE sequence primers iv), selected from Tables 9 and 6 and Tables 3-4 and Tables 1-2 and Table 5, respectively.

[0163] In particular embodiments, methods of the invention comprise the use of at least one set of primers comprising V gene primers of BCR IgH FR2 coding sequence and J gene primers of BCR IgH coding sequence i), and/or V gene primers of BCR IgH distal FR3 coding sequence and J gene primers of BCR IgH coding sequence ii), selected from Tables 8 and 6 and Tables 7 and 6, respectively.

[0164] In some embodiments methods of the invention comprise the use of at least one set of primers i) and ii) and iii), optionally iv) comprising primers selected from SEQ ID NOs1161-1446 and 973-988 and SEQ ID Nos 597-910 and 911-950 and SEQ ID Nos 1-548 and 549-596 and optionally selected from SEQ ID Nos 951-972. In other certain embodiments methods of the invention comprise the use of at least one set of primers i) and ii) comprising primers selected from SEQ ID 1304-1446 and 981-988 and SEQ ID Nos 785-816, 847-876 and 931-935, 941-945 and SEQ ID Nos 406-456 and 557-580-596 and optionally selected from SEQ ID Nos 960, 961 and 972.

[0165] In some embodiments methods of the invention comprise the of the invention comprise at least one set of primers i) and ii) comprising primers selected from SEQ ID NOs: 1065-1160 and 973-988 or selected from SEQ ID NOs: 1065-1112 and 981-988. In other certain embodiments co methods of the invention comprise the use of at least one set of primers i) and ii) comprising primers selected from SEQ ID NOs: 989-1064 and 973-988 or selected from SEQ ID NOs: 1027-1064 and 981-988.

[0166] In certain embodiments, provided is a method for amplification of expression nucleic acid sequences of a BCR repertoire in a sample, comprising performing a multiplex amplification reaction to amplify BCR nucleic acid template molecules having a J gene portion and a V gene portion using at least one set of: i) a plurality of V gene primers directed to a majority of different V genes of a BCR coding sequence comprising at least a portion of framework region 2 (FR2) within the V gene, and ii) a plurality of J gene primers directed to a majority of different J genes of the respective target immune receptor coding sequence, wherein each set of i) and ii) primers directed to the same target immune receptor sequences is selected from the group consisting of IgH, IgLkappa and IgLlambda, and wherein performing amplification using each set results in amplicons representing the entire repertoire of the respective immune receptor in the sample; thereby generating immune receptor amplicons comprising the repertoire of the BCR. In particular embodiments the one or more plurality of V gene primers of i) are directed to sequences over about an 80 nucleotide portion of the framework region. In more particular embodiments the one or more plurality of V gene primers of i) are directed to sequences over about a 50 nucleotide portion of the framework region. In some embodiments the one or more plurality of V gene primers of i) anneal to at least a portion of the FR2 region of the template molecules. In certain embodiments the plurality of J gene primers of ii) comprise at least ten primers that anneal to at least a portion of the J gene of the template molecules. In some embodiments the plurality of J gene primers of ii) comprises about 14 primers that anneal to at least a portion of the J gene portion of the template molecules. In some embodiments the plurality of J gene primers of ii) at least two primers that anneal to at least a portion of the J gene portion of the template molecules. In some embodiments the plurality of J gene primers of ii) comprises at least 2 to about 8 primers that anneal to at least a portion of the J gene portion of the template molecules. In some embodiments the plurality of J gene primers of ii) comprises about 4 primers that anneal to at least a portion of the J gene portion of the template molecules. In some embodiments the plurality of J gene primers of ii) comprises about 3 to about 6 primers that anneal to at least a portion of the J gene portion of the template molecules. In particular embodiments at least one set of the generated amplicons includes complementarity determining regions CDR2 and CDR3 of a BCR gene sequence. In some embodiments the amplicons are about 160 to about 270 nucleotides in length, about 180 to about 250 nucleotides, or about 195 to about 225 nucleotides in length. In some embodiments the nucleic acid template used in methods is cDNA produced by reverse transcribing nucleic acid molecules extracted from a biological sample.

[0167] In certain embodiments, methods are provided for providing sequence of the BCR repertoire in a sample, comprising performing a multiplex amplification reaction to amplify BCR nucleic acid template molecules having a J gene portion and a V gene portion using at least one set of primers comprising i) a plurality of V gene primers directed to a majority of different V genes of at least one BCR coding sequence comprising at least a portion of FR2 within the V gene, and ii) a plurality of J gene primers directed to a majority of different J genes of the respective target immune receptor coding sequence, wherein each set of i) and ii) primers directed to the same target immune receptor sequences is selected from the group consisting of IgH, IgLkappa and IgLlambda, thereby generating BCR amplicon molecules. Sequencing of resulting immune receptor amplicon molecules is then performed and the sequences of the BCR amplicon molecules determined thereby provides sequence of the BCR repertoire in the sample. In some embodiments, determining the sequence of the BCR amplicon molecules includes obtaining initial sequence reads, aligning the initial sequence read to a reference sequence, identifying productive reads, correcting one or more indel errors to generate rescued productive sequence reads, and determining the sequences of the resulting immune receptor molecules. In particular embodiments, determining the sequence of the BCR amplicon molecules includes obtaining initial sequence reads, adding the inferred J gene sequence to the sequence read to create an extended sequence read, aligning the extended sequence read to a reference sequence and identifying productive reads, correcting one or more indel errors to generate rescued productive sequence reads, and determining the sequences of the resulting BCR molecules. In particular embodiments the combination of productive reads and rescued productive reads is at least 40%, at least 50%, at least 60% at least 70% or at least 75% of the sequencing reads for the BCRs. In additional embodiments the method further comprises sequence read clustering and BCR clonotype reporting. In some embodiments, the sequences of the identified immune repertoire are compared to a contemporaneous or current version of the IMGT database and the sequence of at least one allelic variant absent from that IMGT database is identified. In some embodiments the average sequence read length is between 160 and 300 nucleotides, between 180 and 280 nucleotides, between 200 and 260 nucleotides, or between 225 and 270 nucleotides, depending in part on inclusion of any barcode sequence in the read length. In certain embodiments at least one set of the sequenced amplicons includes complementarity determining regions CDR2 and CDR3 of a BCR expression sequence.

[0168] In particular embodiments, methods provided utilize target BCR primer sets comprising V gene primers wherein the one or more of a plurality of V gene primers are directed to sequences over an FR2 region about 70 nucleotides in length. In other particular embodiments the one or more of a plurality of V gene primers are directed to sequences over an FR2 region about 50 nucleotides in length. In certain embodiments a target BCR primer set comprises V gene primers comprising about 4 to about 20 different FR2-directed primers. In some embodiments a target BCR primer set comprises V gene primers comprising about 5 to about 15 different FR2-directed primers. In some embodiments a target BCR primer set comprises V gene primers comprising about 5, 6, 7, 8, 9, 10, 11, or 12 different FR2-directed primers. In some embodiments the target BCR primer set comprises a plurality of J gene primers. In some embodiments a target BCR primer set comprises at least two J gene primers wherein each is directed to at least a portion of a J gene within target polynucleotides. In some embodiments a target BCR primer set comprises 2 to about 8 J gene primers wherein each is directed to at least a portion of a J gene within target polynucleotides. In some embodiments a target BCR primer set comprises about 3 to about 6 different J gene primers wherein each is directed to at least a portion of a J gene within target polynucleotides. In some embodiments a target BCR primer set comprises about 2, 3, 4, 5, 6, 7 or 8 different J gene primers. In particular embodiments a target immune receptor primer set comprises about 4 J gene primers wherein each is directed to at least a portion of a J gene within target polynucleotides.

[0169] In particular embodiments, methods of the invention comprise use of at least one set of primers i) and ii) and iii), optionally iv) comprising primers selected from SEQ ID NOs1161-1446 and 973-988 and SEQ ID Nos 597-910 and 911-950 and SEQ ID Nos 1-548 and 549-596 and optionally selected from SEQ ID Nos 951-972. In other certain embodiments methods comprise use of at least one set of primers i) and ii) comprising primers selected from SEQ ID 1304-1446 and 981-988 and SEQ ID Nos 785-816, 847-876 and 931-935, 941-945 and SEQ ID Nos 406-456 and 557-580-596 and optionally selected from SEQ ID Nos 960, 961 and 972.

[0170] In particular embodiments, methods of the invention comprise use of at least one set of primers i) and ii) comprising primers selected from SEQ ID NOs: 1065-1160 and 973-988 or selected from SEQ ID NOs: 1065-1112 and 981-988. In other certain embodiments methods comprise use of at least one set of primers i) and ii) comprising primers selected from SEQ ID NOs: 989-1064 and 973-988 or selected from SEQ ID NOs: 1027-1064 and 981-988.

[0171] In certain embodiments, methods of the invention comprise use of a biological sample selected from the group consisting of hematopoietic cells, lymphocytes, and tumor cells. In some embodiments the biological sample is selected from the group consisting of peripheral blood mononuclear cells (PBMCs), B cells, circulating tumor cells, and tumor infiltrating lymphocytes (herein “TILs” or “TIL”). In some embodiments, the biological sample comprises B cells undergoing ex vivo activation and/or expansion. In some embodiments, the biological sample comprises cfDNA, such as found, for example, in blood or plasma. In some embodiments, the biological sample is selected from the group consisting of tissue (for example, lymph node, organ tissue, bone marrow), whole blood, synovial fluid, cerebral spinal fluid, tumor biopsy, and other clinical specimens containing cells.

[0172] In some embodiments, methods, compositions, and systems are provided for determining the immune repertoire of a biological sample by assessing both expressed immune receptor RNA and rearranged immune receptor genomic DNA (gDNA) from a biological sample. In some embodiments, the sample RNA and gDNA may be assessed concurrently and following reverse transcription of the RNA to form cDNA, the cDNA and gDNA may be amplified in the same multiplex amplification reaction. In some embodiments, cDNA from the sample RNA and the sample gDNA may undergo multiplex amplification in separate reactions. In some embodiments, cDNA from the sample RNA and sample gDNA may undergo multiplex amplification with parallel primer pools. In some embodiments, the same BCR-directed primer pools are used to assess the BCR repertoire of gDNA and RNA from the sample. In some embodiments, different immune receptor-directed primer pools are used to assess the immune repertoire of gDNA and RNA from the sample. In some embodiments, multiplex amplification reactions are performed separately with cDNA from the sample RNA and with sample gDNA to amplify the same or different target immune receptor molecules from the sample and the resulting immune receptor amplicons are sequenced, thereby providing sequence of the expressed immune receptor RNA and rearranged immune receptor gDNA of a biological sample.

[0173] In some embodiments, different immune receptor-directed primer pools are used to assess the immune repertoire of gDNA and/or RNA from the sample. In some embodiments, multiplex amplification reactions are performed with a set of IgH primers provided herein and with a set of TCR beta-directed primers, for example as described in PCT Application No. PCT/US2018/014111, filed Jan. 17, 2018, and PCT Application No. PCT/US2018/049259, filed Aug. 31, 2018, the entirety of each of which is incorporated herein by reference, or commercially available as Oncomine™ TCR Beta-SR Assay DNA, Oncomine™ TCR Beta-SR Assay RNA, and Oncomine™ TCR Beta-LR Assay (Thermo Fisher Scientific). The ability to assess both the BCR (eg, IgH) and TCR (eg, TCR beta) repertoires from a sample using a single multiplex amplification reaction is useful in saving time and limited biological sample and is applicable in many of the methods described herein, including methods related to allergy and autoimmunity, vaccine development and use, and immune-oncology. For example, combining B cell repertoire analysis with T cell repertoire analysis may be used to improve detection of changes in the immune repertoire following administration of immunotherapy, such as checkpoint blockade or checkpoint inhibitor immunotherapy, potentially indicating a response to the immunotherapy. Also, combining B cell repertoire analysis with T cell repertoire analysis may be used to improve evaluation of vaccine efficacy. Exemplary immune repertoire changes in response to immunotherapy or in response to vaccine administration include, without limitation, a decrease in T and B cell evenness following treatment (for example without limitation, at day 7-14 post treatment) in comparison to the pretreatment evenness values, and an increase in the representation of IgG1 expressing B cells following treatment(s) in comparison to the pretreatment values.

[0174] In some embodiments, the methods and compositions provided are used to identify and/or characterize an immune repertoire of a subject. In some embodiments, methods and compositions provided are used to identify and characterize novel or non-canonical BCR alleles of a subject's immune repertoire. In some embodiments, the sequences of the identified immune repertoire are compared to a contemporaneous or current version of the IMGT database and the sequence of at least one allelic variant absent from that IMGT database is identified. In some embodiments, identified allelic variants absent from the IMGT database are subjected to evidence-based filtering using, for example, criteria such as clone number support, sequence read support and/or number of individuals having the allelic variant. Allelic variants identified and reported as absent from IMGT may be compared to other databases containing immune repertoire sequence information, such as NCBI NR database and Lym1K database, to cross-validate the reported novel or non-canonical BCR alleles. Characterizing the existence of undocumented or non-canonical IgH polymorphism, for example, may help with understanding factors that influence autoimmune disease, infectious disease, and response to immunotherapy. In some embodiments, the sequences of novel or non-canonical BCR alleles identified as described herein may be used to generate recombinant BCR nucleic acids or molecules. In other embodiments accordingly, provided are methods for making recombinant nucleic acids encoding identified novel IgH allelic variants. In some embodiments, provided are methods for making recombinant IgH allelic variant molecules and for making recombinant cells which express the same.

[0175] In some embodiments, methods and compositions provided are used to identify and characterize novel or non-canonical BCR alleles of a subject's immune repertoire. In some embodiments, a patient's immune repertoire may be identified or characterized before and/or after a therapeutic treatment, for example treatment for a cancer or immune disorder. In some embodiments, identification or characterization of an immune repertoire may be used to assess the effect or efficacy of a treatment, to modify therapeutic regimens, and/or to optimize the selection of therapeutic agents. In some embodiments, identification or characterization of the immune repertoire may be used to assess a patient's response to an immunotherapy, a cancer vaccine and/or other immune-based treatment or combination(s) thereof. In some embodiments, identification or characterization of the immune repertoire may indicate a patient's likelihood to respond to a therapeutic agent or may indicate a patient's likelihood to not be responsive to a therapeutic agent.

[0176] In some embodiments, a patient's BCR repertoire may be identified or characterized to monitor progression and/or treatment of hyperproliferative diseases, including detection of residual disease following patient treatment, monitor progression and/or treatment of autoimmune disease, transplantation monitoring, and to monitor conditions of antigenic stimulation, including following vaccination, exposure to bacterial, fungal, parasitic, or viral antigens, or infection by bacteria, fungi, parasites or virus. In some embodiments, identification or characterization of the BCR repertoire may be used to assess a patient's response to an anti-infective or anti-inflammatory therapy.

[0177] In some embodiments, methods and compositions are provided for identifying and/or characterizing immune repertoire clonal populations in a sample from a subject, comprising performing one or more multiplex amplification reactions with the sample or with cDNA prepared from the sample to amplify immune repertoire nucleic acid template molecules having a constant portion and a variable portion using at least one set of primers comprising i) a plurality of V gene primers directed to a majority of different V genes of at least one BCR coding sequence comprising at least a portion of framework region 1 (FR1) within the V gene, and ii) one or more C gene primers directed to at least a portion of a respective target C gene of the immune receptor coding sequence, wherein each set of i) and ii) primers directed to the same target immune receptor sequences is selected from the group consisting of IgH, IgLkappa and IgLlambda, thereby generating BCR amplicon molecules. The method further comprises sequencing the resulting BCR amplicon molecules, determining the sequences of the BCR amplicon molecules, and identifying one or more immune repertoire clonal populations for the target BCR from the sample. In particular, embodiments determining the sequence of the immune receptor amplicon molecules includes obtaining initial sequence reads, aligning the initial sequence read to a reference sequence and identifying productive reads, correcting one or more indel errors to generate rescued productive sequence reads; and determining the sequences of the resulting immune receptor molecules. In other embodiments of such methods and compositions, the one or more multiplex amplification reaction is performed using at least one set of primers comprising i) a plurality of V gene primers directed to a majority of different V genes of at least one BCR coding sequence comprising at least a portion of framework region 3 (FR3) within the V gene, and ii) one or more J gene primers directed to at least a portion of a respective target J gene of the BCR coding sequence, wherein each set of i) and ii) and iii) primers directed to the same target immune receptor sequences is selected from the group consisting of IgH, IgLlambda, and IgLkappa In some embodiments, multiplex amplification reactions are performed with primer sets designed to generate amplicons which include the expressed CDR3 regions of the target immune receptor. In some embodiments, multiplex amplification reactions are performed using i) (a) a plurality of V gene primers directed to a majority of different V genes of BCR IgH coding sequence comprising at least a portion of framework region 3 (FR3) within the V gene and (b) a plurality of J gene primers directed to at least a portion of a majority of different J genes of the BCR IgH coding sequence; and ii) (a) a plurality of V gene primers directed to a majority of different V genes of BCR IgLlambda coding sequence comprising at least a portion of framework region 3 (FR3) within the V gene, (b) a plurality of J gene primers directed to at least a portion of a majority of different J genes of the BCR IgLlambda coding sequence; and iii) (a) a plurality of V gene primers directed to a majority of different V genes of BCR IgLkappa coding sequence comprising at least a portion of framework region 1 (FR3) within the V gene, wherein each set of i) and ii) and iii) primers is directed to coding sequences of the same BCR gene such that performing the amplification using the at least one set of i) and ii) primers results in amplicon molecules representing the target BCR repertoire in the sample; thereby generating target BCR amplicon molecules comprising the target BCR repertoire. For example, exemplary primers specific for IgH V gene FR3 regions are shown in Table 9 and exemplary primers specific for IgH J genes are shown in Table 6, exemplary primers specific for IgLkappa V gene FR3 regions are shown in Table 3 and exemplary primers specific for IgLkappa J genes are shown in Table 4, exemplary primers specific for IgLlambda V gene FR3 regions are shown in Table 1 and exemplary primers specific for IgLlambda J genes are shown in Table 2 and exemplary primers specific for KDE and Cint are shown in Table 5. The method further comprises sequencing the resulting BCR amplicon molecules, determining the sequences of the BCR amplicon molecules, and identifying one or more immune repertoire clonal populations for the target BCR from the sample. In particular, embodiments determining the sequence of the immune receptor amplicon molecules includes obtaining initial sequence reads, adding the inferred J gene sequence to the sequence read to create an extended sequence read, aligning the extended sequence read to a reference sequence and identifying productive reads, correcting one or more indel errors to generate rescued productive sequence reads, and determining the sequences of the resulting immune receptor molecules.

[0178] In some embodiments, the multiplex amplification reaction uses i) (a) a plurality of V gene primers directed to a majority of different V genes of at least one BCR coding sequence comprising at least a portion of distal FR3 within the V gene, and/or (b) a plurality of V gene primers directed to a majority of different V genes of at least one BCR coding sequence comprising at least a portion of FR2 within the V gene; and ii) a plurality of J gene primers directed to at least a portion of a majority of different J genes of the at least one BCR coding sequence, wherein each set of i) and ii) primers is directed to coding sequences of the same target BCR IgH gene such that performing the amplification using the at least one set of i) and ii) primers results in amplicon molecules representing the target BCR repertoire in the sample; thereby generating target BCR amplicon molecules comprising the target BCR repertoire. For example, exemplary primers specific for IgH V gene FR2 regions are shown in Table 7 and exemplary primers specific for IgH J genes are shown in Table 6 and exemplary primers specific for IgH V gene distalFR3 regions are shown in Table 8 and exemplary primers specific for IgH J genes are shown in Table 6. The method further comprises sequencing the resulting BCR amplicon molecules, determining the sequences of the BCR amplicon molecules, and identifying one or more immune repertoire clonal populations for the target BCR from the sample. In particular, embodiments determining the sequence of the immune receptor amplicon molecules includes obtaining initial sequence reads, adding the inferred J gene sequence to the sequence read to create an extended sequence read, aligning the extended sequence read to a reference sequence and identifying productive reads, correcting one or more indel errors to generate rescued productive sequence reads, and determining the sequences of the resulting immune receptor molecules.

[0179] In some embodiments, accordingly, methods, compositions and workflows provided are for use, without limitation, in assessing clonality, diversity and richness of B cell populations. For example, clonal expansion may identify B cells that are responding to antigen challenge and longitudinal analysis may be used to evaluate efficacy of vaccination. In some embodiments, methods, compositions and workflows provided are for use in identifying clonal lineages with many members. For example, clonal lineages with many members may represent B cells that are responding to chronic antigen stimulation. In some embodiments, methods, compositions and workflows provided are for use in identifying antigen-specific B cells. For example, comparing the IgH repertoire across groups of individuals who have been exposed to the same antigen may reveal shared IgH amino acid motifs indicative of antigen specific IgH chains. In some embodiments, methods, compositions and workflows provided are for use in evaluating clonal overlap. For example, clonal overlap analysis may reveal B cell trafficking and developmental relationships between populations of B cells. In some embodiments, methods, compositions and workflows provided are for use in determining VDJ sequence of dominant clones, including in longitudinal analysis. In some embodiments, methods, compositions and workflows provided are for use in identifying malignant subclones via clonal lineage analysis. For example, for some B cell malignancies (e.g., follicular lymphoma), somatic hypermutation is ongoing, leading to the presence of malignant subclones having different but related IgH sequences that may be tracked with the provided methods, compositions and workflows.

[0180] In some embodiments, methods, compositions and workflows provided are for use in evaluating clonal evolution. For example, analysis of clonal lineages may reveal isotype switching and IgH residues important for antigen binding. In some embodiments, methods, compositions and workflows provided are for use in evaluating isotype abundance. For example, over or under representation of certain isotypes may indicate disease or immunodeficiency such as, without limitation, elevated IgG1 in response to viral infection, elevated IgE in allergy, and missing or underrepresented isotypes may indicate primary immunodeficiency. In some embodiments, methods, compositions and workflows provided are for use in quantifying somatic hypermutation. For example, the frequency of somatic hypermutation provides insight into the stage of B cell development at which malignant transformation occurred.

[0181] In some embodiments, methods and compositions provided are used to identify and/or characterize somatic hypermutations (SHM) within a BCR repertoire or clonal populations. In some embodiments, methods and compositions provided are used to identify and/or screen for rare BCR clones or subclones, for example those having somatically hypermutated VDJ rearrangements. In some embodiments, identification, quantification and/or characterization of rare BCR clones may provide biomarkers for a given condition or treatment response. Accordingly, in some embodiments, methods and compositions provided herein are used to identify, screen for and/or characterize BCR clones as biomarkers using samples obtained for example from retrospective or longitudinal subject studies.

[0182] In some embodiments, methods for identifying and/or characterizing BCR clonal lineages and SHM comprise performing one or more multiplex amplification reaction with a subject's sample to amplify BCR nucleic acid template molecules having a constant portion and a variable portion using at least one set of primers directed to a majority of different V genes of at least one BCR coding sequence comprising at least a portion of FR1, FR2 or FR3 within the V gene, and one or more C gene primers directed to at least a portion of a respective target C gene of the BCR coding sequence, sequencing the resultant BCR amplicons, and performing VDJ sequence analysis provided herein to identify and/or quantify SMH and clonal lineages for the target BCR from the sample. In other embodiments, methods for identifying and/or characterizing BCR clonal lineages and SHM comprise performing one or more multiplex amplification reaction with a subject's sample to amplify BCR nucleic acid template molecules having a J gene portion and a variable portion using at least one set of primers directed to a majority of different V genes of at least one BCR coding sequence comprising at least a portion of FR1, FR2 or FR3 within the V gene, and a plurality of J gene primers directed to a majority of different J genes of the respective target BCR coding sequence, sequencing the resultant BCR amplicons, and performing VDJ sequence analysis provided herein to identify SHM and clonal lineages for the target BCR from the sample.

[0183] In certain embodiments, the methods and compositions provided are used to monitor changes in BCR repertoire clonal populations and clonal lineages, for example changes in clonal expansion, changes in clonal contraction, changes in relative ratios of clones or clonal populations within a BCR repertoire, changes in expansion or contraction of clonal lineages, changes in somatic hypermutation and/or isotype class switching within a repertoire. In some embodiments, the provided methods and compositions are used to monitor changes in BCR repertoire clonal populations or clonal lineages (e.g., clonal population or lineage expansion, clonal population or lineage contraction, clonal population or lineage changes in relative ratios, changes in somatic hypermutation and/or class switching) in response to tumor growth. In some embodiments, the provided methods and compositions are used to monitor changes in BCR repertoire clonal populations (e.g., clonal population or lineage expansion, clonal population or lineage contraction, clonal population or lineage changes in relative ratios, changes in somatic hypermutation and/or class switching) in response to tumor treatment. In some embodiments, the provided methods and compositions provided are used to monitor changes in BCR repertoire clonal populations or clonal lineages (e.g., clonal population or lineage expansion, clonal population or lineage contraction, clonal population or lineage changes in relative ratios, changes in somatic hypermutation and/or class switching) during a remission period. For many lymphoid malignancies, a clonal B cell receptor sequence can be used a biomarker for the malignant cells of the particular cancer (e.g., leukemia) and to monitor residual disease, tumor expansion, contraction, and/or treatment response. In certain embodiments a clonal B cell receptor may be identified and further characterized to confirm a new utility in therapeutic, biomarker and/or diagnostic use.

[0184] In some embodiments, methods and compositions are provided for monitoring changes in BCR clonal populations in a subject, comprising performing one or more multiplex amplification reaction with a subject's sample to amplify immune repertoire nucleic acid template molecules having a J gene portion and a V gene portion using at least one set of primers directed to a majority of different V genes of at least one BCR coding sequence comprising at least a portion of FR1, FR2 or FR3 within the V gene, and a plurality of J gene primers directed to a majority of different J genes of the respective target BCR coding sequence, sequencing the resultant BCR amplicons, identifying immune repertoire clonal populations for the target BCR from the sample, and comparing the identified immune repertoire clonal populations to those identified in samples obtained from the subject at a different time. In various embodiments, the one or more multiplex amplification reactions performed in such methods may be a single multiplex amplification reaction or may be two or more multiplex amplification reactions performed in parallel, for example parallel, highly multiplexed amplification reactions performed with different primer pools. Samples for use in monitoring changes in BCR repertoire clonal populations include, without limitation, samples obtained prior to a diagnosis, samples obtained at any stage of diagnosis, samples obtained during a remission, samples obtained at any time prior to a treatment (pre-treatment sample), samples obtained at any time following completion of treatment (post-treatment sample), and samples obtained during the course of treatment.

[0185] In certain embodiments, methods and compositions are provided for identifying and/or characterizing the BCR repertoire of a patient to monitor progression and/or treatment of the patient's hyperproliferative disease. In some embodiments, the methods and compositions provided are used for minimal residual disease (MRD) monitoring for a patient following treatment. In some embodiments, the methods and compositions provided allow for the deep sequencing of the patient BCR repertoire useful for MRD measurements and for identifying rare BCR clones. In some embodiments, monitoring MRD includes assessing somatic hypermutation of the BCR repertoire. In some embodiments, the methods and compositions are used to identify and/or track B cell lineage malignancies. In some embodiments, the methods and compositions are used to detect and/or monitor MRD in patients diagnosed with leukemia or lymphoma, including without limitation, acute lymphoblastic leukemia, chronic myeloid leukemia, chronic lymphocytic leukemia, chronic myelogenous leukemia, B cell lymphoma, mantle cell lymphoma, and multiple myeloma. In some embodiments, the methods and compositions are used to detect and/or monitor MRD in patients diagnosed with solid tumors, including without limitation, breast cancer, lung cancer, colorectal, and neuroblastoma. In some embodiments, the methods and compositions are used to detect and/or monitor MRD in patients following cancer treatment including without limitation bone marrow transplant, lymphocyte infusion, adoptive cell therapy, other cell-based immunotherapy, and antibody-based immunotherapy.

[0186] In some embodiments, methods and compositions are provided for identifying and/or characterizing the BCR repertoire of a patient to monitor progression and/or treatment of the patient's hyperproliferative disease, comprising performing one or more multiplex amplification reactions with a sample from the patient or with cDNA prepared from the sample to amplify BCR nucleic acid template molecules having a constant portion and a variable portion using at least one set of primers comprising i) a plurality of V gene primers directed to a majority of different V genes of at least one BCR coding sequence comprising at least a portion of framework region 3 (FR3) within the V gene, and ii) one or more J gene primers directed to at least a portion of a respective target J gene of the BCR coding sequence, wherein each set of i) and ii) primers directed to the same target immune receptor sequences is selected from the group consisting of IgH, IgLkappa, and IgLlambda, thereby generating BCR amplicon molecules. The method further comprises sequencing the resulting BCR amplicon molecules, determining the sequences of the BCR amplicon molecules, and identifying immune repertoire for the target BCR from the sample. In particular, embodiments determining the sequence of the immune receptor amplicon molecules includes obtaining initial sequence reads, aligning the initial sequence read to a reference sequence and identifying productive reads, correcting one or more indel errors to generate rescued productive sequence reads; and determining the sequences of the resulting immune receptor molecules. In other embodiments of such methods and compositions, the multiplex amplification reaction is performed using at least one set of primers comprising i) a plurality of V gene primers directed to a majority of different V genes of at least one BCR coding sequence comprising at least a portion of FR2 within the V gene, and ii) one or more C gene primers directed to at least a portion of a respective target C gene of the BCR coding sequence, wherein each set of i) and ii) primers directed to the same target immune receptor sequences is selected from the group consisting of IgH, IgLkappa and IgLlambda.

[0187] In some embodiments, methods and compositions are provided for identifying and/or characterizing the BCR repertoire of a patient to monitor progression and/or treatment of the patient's hyperproliferative disease, comprising performing one or more multiplex amplification reaction with a sample from the patient or with cDNA prepared from the sample to amplify immune repertoire nucleic acid template molecules having a J gene portion and a V gene portion using at least one set of primers comprising i) a plurality of V gene primers directed to a majority of different V genes of at least one BCR coding sequence comprising at least a portion of framework region 3 (FR3) within the V gene, and ii) a plurality of J gene primers directed to a majority of different J genes of the respective target BCR coding sequence, wherein each set of i) and ii) primers directed to the same target immune receptor sequences is selected from the group consisting of IgH, IgLkappa, and IgLlambda, thereby generating BCR amplicon molecules. The method further comprises sequencing the resulting BCR amplicon molecules, determining the sequences of the BCR amplicon molecules, and identifying immune repertoire for the target BCR from the sample. In particular, embodiments determining the sequence of the immune receptor amplicon molecules includes obtaining initial sequence reads, adding the inferred J gene sequence to the sequence read to create an extended sequence read, aligning the extended sequence read to a reference sequence and identifying productive reads, correcting one or more indel errors to generate rescued productive sequence reads; and determining the sequences of the resulting immune receptor molecules. In other embodiments of such methods and compositions, the multiplex amplification reaction is performed using at least one set of primers comprising i) a plurality of V gene primers directed to a majority of different V genes of at least one BCR coding sequence comprising at least a portion of FR1 within the V gene, and ii) a plurality of J gene primers directed to a majority of different J genes of the respective target BCR coding sequence, wherein each set of i) and ii) primers directed to the same target immune receptor sequences is selected from the group consisting of IgH, IgLkappa and IgLlambda. In other embodiments of such methods and compositions, the multiplex amplification reaction is performed using at least one set of primers comprising i) a plurality of V gene primers directed to a majority of different V genes of at least one BCR coding sequence comprising at least a portion of FR2 within the V gene, and ii) a plurality of J gene primers directed to a majority of different J genes of the respective target BCR coding sequence, wherein each set of i) and ii) primers directed to the same target immune receptor sequences is selected from the group consisting of IgH, IgLkappa and IgLlambda.

[0188] In some embodiments, methods and compositions are provided for MRD monitoring for a patient having a hyperproliferative disease, comprising performing one or more multiplex amplification reaction with a patient's sample to amplify immune repertoire nucleic acid template molecules having a J gene portion and a V gene portion using at least one set of primers directed to a majority of different V genes of at least one BCR coding sequence comprising at least a portion of FR1, FR2 or FR3 within the V gene, and a plurality of J gene primers directed to a majority of different J genes of the respective target BCR coding sequence, sequencing the resultant BCR amplicons, identifying immune repertoire sequences for the target BCR, and detecting the presence or absence of immune receptor sequence(s) in the sample associated with the hyperproliferative disease. In various embodiments, the one or more multiplex amplification reactions performed in such methods may be a single multiplex amplification reaction or may be two or more multiplex amplification reactions performed in parallel, for example parallel, highly multiplexed amplification reactions performed with different primer pools. Samples for use in MRD monitoring include, without limitation, samples obtained during a remission, samples obtained at any time following completion of treatment (post-treatment sample), and samples obtained during the course of treatment.

[0189] In certain embodiments, methods and compositions are provided for identifying and/or characterizing the BCR repertoire of a subject in response to a treatment. In some embodiments, the methods and compositions are used to characterize and/or monitor populations or clones of tumor infiltrating lymphocytes (TILs) before, during, and/or following tumor treatment. In some embodiments, profiling immune receptor repertoires of TILs provides characterization and/or assessment of the tumor microenvironment. In some embodiments, the methods and compositions for determining immune repertoire are used to identify and/or track therapeutic B cell population(s). In some embodiments, the methods and compositions provided are used to identify and/or monitor the persistence of cell-based therapies following patient treatment, and/or immune reconstitution after allogeneic hematopoietic cell transplantation.

[0190] In some embodiments, the methods and compositions provided are used to characterize and/or monitor B cell clones or populations present in patient sample following administration of cell-based therapies to the patient, including but not limited to, e.g., cancer vaccine cells, CAR-T, TIL, and/or other engineered cell-based therapy. In some embodiments, the provided methods and compositions are used to characterize and/or monitor BCR repertoire in a patient sample following cell-based therapies in order to assess and/or monitor the patient's response to the administered cell-based therapy. Samples for use in such characterizing and/or monitoring following cell-based therapy include, without limitation, circulating blood cells, circulating tumor cells, TILs, tissue, cfDNA, and tumor sample(s) from a patient.

[0191] In some embodiments, methods and compositions are provided for monitoring cell-based therapy for a patient receiving such therapy, comprising performing one or more multiplex amplification reactions with a patient's sample to amplify BCR repertoire nucleic acid template molecules having a J gene portion and a V gene portion using at least one set of primers directed to a majority of different V genes of at least one BCR coding sequence comprising at least a portion of FR1, FR2 or FR3 within the V gene, and a plurality of J gene primers directed to a majority of different J genes of the respective target BCR coding sequence, sequencing the resultant BCR amplicons, identifying immune repertoire sequences for the target BCR, and detecting the presence or absence of BCR sequence(s) in the sample associated with the cell-based therapy.

[0192] In some embodiments, methods and compositions are provided for monitoring a patient's response following administration of a cell-based therapy, comprising performing one or more multiplex amplification reactions with a patient's sample to amplify BCR repertoire nucleic acid template molecules having a J gene portion and a V gene portion using at least one set of primers directed to a majority of different V genes of at least one BCR coding sequence comprising at least a portion of FR1, FR2 or FR3 within the V gene, and a plurality of J gene primers directed to a majority of different J genes of the respective target BCR coding sequence, sequencing the resultant BCR amplicons, identifying immune repertoire sequences for the target BCR, and comparing the identified BCR repertoire to the immune receptor sequence(s) identified in samples obtained from the patient at a different time. Cell-based therapies suitable for such monitoring include, without limitation, TILs, and other enriched autologous cells. In various embodiments, the one or more multiplex amplification reactions performed in such methods may be a single multiplex amplification reaction or may be two or more multiplex amplification reactions performed in parallel, for example parallel, highly multiplexed amplification reactions performed with different primer pools. Samples for use in such monitoring include, without limitation, samples obtained prior to a diagnosis, samples obtained at any stage of diagnosis, samples obtained during a remission, samples obtained at any time prior to a treatment (pre-treatment sample), samples obtained at any time following completion of treatment (post-treatment sample), and samples obtained during the course of treatment.

[0193] In some embodiments, the methods and compositions for determining B cell receptor repertoires, are used to measure and/or assess immunocompetence before, during, and/or following a treatment, including without limitation, solid organ transplant or bone marrow transplant.

[0194] In some embodiments, methods and compositions are provided for identifying and/or characterizing the BCR repertoire of a subject in response to a treatment, comprising obtaining a sample from the subject following initiation of a treatment, performing one or more multiplex amplification reactions with the sample or with cDNA prepared from the sample to amplify BCR nucleic acid template molecules having a J gene portion and a V gene portion using at least one set of primers comprising i) a plurality of V gene primers directed to a majority of different V genes of at least one BCR coding sequence comprising at least a portion of framework region 3 (FR3) within the V gene, and ii) a plurality of J gene primers directed to a majority of different J genes of the respective target BCR coding sequence, wherein each set of i) and ii) primers directed to the same target immune receptor sequences is selected from the group consisting of IgH, IgLkappa and IgLlambda, thereby generating BCR amplicon molecules. The method further comprises sequencing the resulting BCR amplicon molecules, determining the sequences of the BCR amplicon molecules, and identifying immune repertoire for the target BCR from the sample. In some embodiments, the method further comprises comparing the identified BCR repertoire from the sample obtained following treatment initiation to the BCR repertoire from a sample of the patient obtained prior to treatment. In particular, embodiments determining the sequence of the BCR amplicon molecules includes obtaining initial sequence reads, adding the inferred J gene sequence to the sequence read to create an extended sequence read, aligning the extended sequence read to a reference sequence and identifying productive reads, correcting one or more indel errors to generate rescued productive sequence reads; and determining the sequences of the resulting BCR molecules. In other embodiments of such methods and compositions, the multiplex amplification reaction is performed using at least one set of primers comprising i) a plurality of V gene primers directed to a majority of different V genes of at least one BCR coding sequence comprising at least a portion of FR1 within the V gene, and ii) a plurality of J gene primers directed to a majority of different J genes of the respective target BCR coding sequence, wherein each set of i) and ii) primers directed to the same target immune receptor sequences is selected from the group consisting of IgH, IgLkappa and IgLlambda. In other embodiments of such methods and compositions, the multiplex amplification reaction is performed using at least one set of primers comprising i) a plurality of V gene primers directed to a majority of different V genes of at least one BCR coding sequence comprising at least a portion of FR2 within the V gene, and ii) a plurality of J gene primers directed to a majority of different J genes of the respective target BCR coding sequence, wherein each set of i) and ii) primers directed to the same target immune receptor sequences is selected from the group consisting of IgH, IgLkappa and IgLlambda.

[0195] In some embodiments, methods and compositions are provided for monitoring changes in the BCR repertoire of a subject in response to a treatment, comprising performing one or more multiplex amplification reactions with a subject's or patient's sample to amplify BCR nucleic acid template molecules having a J gene portion and a V gene portion using at least one set of primers directed to a majority of different V genes of at least one BCR coding sequence comprising at least a portion of FR1, FR2 or FR3 within the V gene, and a plurality of J gene primers directed to a majority of different J genes of the respective target BCR coding sequence, sequencing the resultant BCR amplicons, identifying immune repertoire sequences for the target BCR from the sample, and comparing the identified BCR repertoire to those identified in samples obtained from the subject at a different time. In various embodiments, the one or more multiplex amplification reactions performed in such methods may be a single multiplex amplification reaction or may be two or more multiplex amplification reactions performed in parallel, for example parallel, highly multiplexed amplification reactions performed with different primer pools. Samples for use in monitoring changes in BCR repertoire include, without limitation, samples obtained prior to a diagnosis, samples obtained at any stage of diagnosis, samples obtained during a remission, samples obtained at any time prior to a treatment (pre-treatment sample), samples obtained at any time following completion of treatment (post-treatment sample), and samples obtained during the course of treatment.

[0196] In certain embodiments, the methods and compositions provided are used to characterize and/or monitor BCR repertoires associated with immune system-mediated adverse event(s), including without limitation, those associated with inflammatory conditions, autoimmune reactions, and/or autoimmune diseases or disorders. In some embodiments, the methods and compositions provided are used to identify and/or monitor B cell, or B cell and T cell, immune repertoires associated with chronic autoimmune diseases or disorders including, without limitation, multiple sclerosis, Type I diabetes, narcolepsy, rheumatoid arthritis, ankylosing spondylitis, asthma, and SLE. In some embodiments, a systemic sample, such as a blood sample, is used to determine the immune repertoire(s) of an individual with an autoimmune condition. In some embodiments, a localized sample, such as a fluid sample from an affected joint or region of swelling, is used to determine the immune repertoire(s) of an individual with an autoimmune condition. In some embodiments, comparison of the immune repertoire found in a localized or affected area sample to the immune repertoire found in the systemic sample can identify clonal T or B cell populations to be targeted for removal.

[0197] In some embodiments, methods and compositions are provided for identifying and/or monitoring a BCR repertoire associated with progression and/or treatment of a patient's immune system-mediated adverse event(s), comprising performing one or more multiplex amplification reactions with a patient's sample to amplify BCR nucleic acid template molecules having a J gene portion and a V gene portion using at least one set of primers directed to a majority of different V genes of at least one BCR coding sequence comprising at least a portion of FR1, FR2 or FR3 within the V gene, and a plurality of J gene primers directed to a majority of different J genes of the respective target BCR coding sequence, sequencing the resultant BCR amplicons, identifying BCR sequences for the target immune receptor from the sample, and comparing the identified BCR repertoire to the BCR repertoire(s) identified in samples obtained from the patient at a different time. In various embodiments, the one or more multiplex amplification reactions performed in such methods may be a single multiplex amplification reaction or may be two or more multiplex amplification reactions performed in parallel, for example parallel, highly multiplexed amplification reactions performed with different primer pools. Samples for use in monitoring changes in immune repertoire associated with immune system-mediated adverse event(s) include, without limitation, samples obtained prior to a diagnosis, samples obtained at any stage of diagnosis, samples obtained during a remission, samples obtained at any time prior to a treatment (pre-treatment sample), samples obtained at any time following completion of treatment (post-treatment sample), and samples obtained during the course of treatment.

[0198] In some embodiments, the methods and compositions provided are used to characterize and/or monitor immune repertoires associated with passive immunity, including naturally acquired passive immunity and artificially acquired passive immunity therapies. For example, the methods and compositions provided may be used to identify and/or monitor protective antibodies that provide passive immunity to the recipient following transfer of antibody-mediated immunity to the recipient, including without limitation, antibody-mediated immunity conveyed from a mother to a fetus during pregnancy or to an infant through breast-feeding, or conveyed via administration of antibodies to a recipient. In another example, the methods and compositions provided may be used to identify and/or monitor B cell and/or T cell immune repertoires associated with passive transfer of cell-mediated immunity to a recipient, such as the administration of mature circulating lymphocytes to a recipient histocompatible with the donor. In some embodiments, the methods and compositions provided are used to monitor the duration of passive immunity in a recipient.

[0199] In some embodiments, the methods and compositions provided are used to characterize and/or monitor immune repertoires associated with active immunity or vaccination therapies. For example, following exposure to a vaccine or infectious agent, the methods and compositions provided may be used to identify and/or monitor protective antibodies or protective clonal B cell populations, or clonal B cell and T cell populations, that may provide active immunity to the exposed individual. In some embodiments, the methods and compositions provided are used to monitor the duration of B cell clones, or B cell and T cell clones, which contribute to immunity in an exposed individual. In some embodiments, the methods and compositions provided are used to identify and/or monitor B cell and/or T cell immune repertoires associated with exposure to bacterial, fungal, parasitic, or viral antigens. In some embodiments, the methods and compositions provided are used to identify and/or monitor B cell and/or T cell immune repertoires associated with bacterial, fungal, parasitic, or viral infection. Accordingly, in some embodiments, methods and composition provided are for use in vaccine development, including without limitation identifying and/or characterizing one or responses to a vaccine candidate, and assessing one or more responses to a vaccine for quality or regulatory purposes.)

[0200] In some embodiments, methods and compositions are provided for monitoring changes in the BCR repertoire following exposure to a vaccine or infectious agent, comprising performing one or more multiplex amplification reactions with an exposed subject's sample to amplify BCR repertoire nucleic acid template molecules having a J gene portion and a V gene portion using at least one set of primers directed to a majority of different V genes of at least one BCR coding sequence comprising at least a portion of FR1, FR2 or FR3 within the V gene, and a plurality of J gene primers directed to a majority of different J genes of the respective target BCR coding sequence, sequencing the resultant BCR amplicons, identifying BCR sequences for the target immune receptor from the sample, and comparing the identified BCR repertoire to the BCR repertoire(s) identified in samples obtained from the patient at a different time. Accordingly, methods and compositions may be used to monitor changes in B cell repertoire (including isotype class switching) and assess a subject's response to vaccine exposure.

[0201] In some embodiments, the methods and compositions provided are used to screen or characterize lymphocyte populations which are grown and/or activated in vitro for use as immunotherapeutic agents or in immunotherapeutic-based regimens. In some embodiments, the methods and compositions provided are used to screen or characterize TIL populations or other harvested B cell populations which are grown and/or activated in vitro. In some embodiments, determining the IgH sequence of a BCR facilitates identification and production of antigen-specific B cells. In some embodiments, the methods and compositions provided are used to screen or characterize engineered B cell populations which are grown and/or activated in vitro, for use, for example, in immunotherapy or antibody production. In some embodiments, the methods and compositions provided are used to assess cell populations by monitoring BCR repertoires during ex vivo workflows for manufacturing engineered cell preparations, for example, for quality control or regulatory testing purposes.

[0202] In some embodiments, the sequences of novel or non-canonical BCR alleles identified as described herein may be used to generate recombinant BCR nucleic acids or molecules. In some embodiments, the methods and compositions provided are used in the screening and/or production of recombinant antibody libraries. Compositions provided which are directed to identifying BCRs can be used to rapidly evaluate recombinant antibody library size and composition to identify antibodies of interest.

[0203] In some embodiments, profiling immune receptor repertoires as provided herein may be combined with profiling immune response gene expression to provide characterization of the tumor microenvironment. In some embodiments, combining or correlating a tumor sample's BCR repertoire profile with a targeted immune response gene expression profile provides a more thorough analysis of the tumor microenvironment and may suggest or provide guidance for immunotherapy treatments.

[0204] Suitable cells for analysis include, without limitation, various hematopoietic cells, lymphocytes, and tumor cells, such as peripheral blood mononuclear cells (PBMCs), B cells, circulating tumor cells, and tumor infiltrating lymphocytes (TILs). Lymphocytes expressing immunoglobulin include pre-B cells, B-cells, e.g. memory B cells, and plasma cells. For example, in some embodiments, a sample comprising PBMCs may be used as a source for antibody immune repertoire analysis. The sample may contain, for example, lymphocytes, monocytes, and macrophages as well as antibodies and other biological constituents.

[0205] Analysis of the BCR repertoire is of interest for conditions involving cellular proliferation and antigenic exposure, including without limitation, the presence of cancer, exposure to cancer antigens, exposure to antigens from an infectious agent, exposure to vaccines, exposure to allergens, exposure to food stuffs, presence of a graft or transplant, and the presence of autoimmune activity or disease. Conditions associated with immunodeficiency are also of interest for analysis, including congenital and acquired immunodeficiency syndromes.

[0206] B cell lineage malignancies of interest include, without limitation, multiple myeloma; acute lymphocytic leukemia (ALL); relapsed/refractory B cell ALL, chronic lymphocytic leukemia (CLL); diffuse large B cell lymphoma; mucosa-associated lymphatic tissue lymphoma (MALT); small cell lymphocytic lymphoma; mantle cell lymphoma (MCL); Burkitt lymphoma; mediastinal large B cell lymphoma; Waldenström macroglobulinemia; nodal marginal zone B cell lymphoma (NMZL); splenic marginal zone lymphoma (SMZL); intravascular large B-cell lymphoma; primary effusion lymphoma; lymphomatoid granulomatosis, etc. Non-malignant B cell hyperproliferative conditions include monoclonal B cell lymphocytosis (MBL).

[0207] Other malignancies of interest include, without limitation, acute myeloid leukemia, head and neck cancers, brain cancer, breast cancer, ovarian cancer, cervical cancer, colorectal cancer, endometrial cancer, gallbladder cancer, gastric cancer, bladder cancer, prostate cancer, testicular cancer, liver cancer, lung cancer, kidney (renal cell) cancer, esophageal cancer, pancreatic cancer, thyroid cancer, bile duct cancer, pituitary tumor, wilms tumor, kaposi sarcoma, osteosarcoma, thymus cancer, skin cancer, heart cancer, oral and larynx cancer, neuroblastoma and non-hodgkin lymphoma.

[0208] Neurological inflammatory conditions are of interest, e.g. Alzheimer's Disease, Parkinson's Disease, Lou Gehrig's Disease, etc. and demyelinating diseases, such as multiple sclerosis, chronic inflammatory demyelinating polyneuropathy, etc. as well as inflammatory conditions such as rheumatoid arthritis. Systemic lupus erythematosus (SLE) is an autoimmune disease characterized by polyclonal B cell activation, which results in a variety of anti-protein and non-protein autoantibodies (see Kotzin et al. (1996) Cell 85:303-306). These autoantibodies form immune complexes that deposit in multiple organ systems, causing tissue damage. An autoimmune component may be ascribed to atherosclerosis, where candidate autoantigens include Hsp60, oxidized LDL, and 2-Glycoprotein I (2GPI).

[0209] A sample for use in the methods described herein may be one that is collected from a subject with a malignancy or hyperproliferative condition, including lymphomas, leukemias, and plasmacytomas. A lymphoma is a solid neoplasm of lymphocyte origin, and is most often found in the lymphoid tissue. Thus, for example, a biopsy from a lymph node, e.g. a tonsil, containing such a lymphoma would constitute a suitable biopsy. Samples may be obtained from a subject or patient at one or a plurality of time points in the progression of disease and/or treatment of the disease.

[0210] In some embodiments, the disclosure provides methods for performing target-specific multiplex PCR on a cDNA sample having a plurality of expressed immune receptor target sequences using primers having a cleavable group.

[0211] In certain embodiments, library and/or template preparation to be sequenced are prepared automatically from a population of nucleic acid samples using the compositions provided herein using an automated systems, e.g., the Ion Chef™ system.

[0212] As used herein, the term “subject” includes a person, a patient, an individual, someone being evaluated, etc.

[0213] As used herein, the terms “comprises,” “comprising,” “includes,” “including,” “has,” “having” or any other variation thereof, are intended to cover a non-exclusive inclusion. For example, a process, method, article, or apparatus that comprises a list of features is not necessarily limited only to those features but may include other features not expressly listed or inherent to such process, method, article, or apparatus. Further, unless expressly stated to the contrary, “or” refers to an inclusive-or and not to an exclusive-or.

[0214] As used herein, “antigen” refers to any substance that, when introduced into a body, e.g., of a subject, can stimulate an immune response, such as the production of an antibody that recognizes the antigen. Antigens include molecules such as nucleic acids, lipids, ribonucleoprotein complexes, protein complexes, proteins, polypeptides, peptides and naturally occurring or synthetic modifications of such molecules against which an immune response involving T and/or B lymphocytes can be generated. With regard to autoimmune disease, the antigens herein are often referred to as autoantigens. With regard to allergic disease the antigens herein are often referred to as allergens. Autoantigens are any molecule produced by the organism that can be the target of an immunologic response, including peptides, polypeptides, and proteins encoded within the genome of the organism and post-translationally-generated modifications of these peptides, polypeptides, and proteins. Such molecules also include carbohydrates, lipids and other molecules produced by the organism. Antigens also include vaccine antigens, which include, without limitation, pathogen antigens, cancer associated antigens, allergens, and the like.

[0215] As used herein, “amplify”, “amplifying” or “amplification reaction” and their derivatives, refer to any action or process whereby at least a portion of a nucleic acid molecule (referred to as a template nucleic acid molecule) is replicated or copied into at least one additional nucleic acid molecule. The additional nucleic acid molecule optionally includes sequence that is substantially identical or substantially complementary to at least some portion of the template nucleic acid molecule. The template nucleic acid molecule can be single-stranded or double-stranded and the additional nucleic acid molecule can independently be single-stranded or double-stranded. In some embodiments, amplification includes a template-dependent in vitro enzyme-catalyzed reaction for the production of at least one copy of at least some portion of the nucleic acid molecule or the production of at least one copy of a nucleic acid sequence that is complementary to at least some portion of the nucleic acid molecule. Amplification optionally includes linear or exponential replication of a nucleic acid molecule. In some embodiments, such amplification is performed using isothermal conditions; in other embodiments, such amplification can include thermocycling. In some embodiments, the amplification is a multiplex amplification that includes the simultaneous amplification of a plurality of target sequences in a single amplification reaction. At least some of the target sequences can be situated on the same nucleic acid molecule or on different target nucleic acid molecules included in the single amplification reaction. In some embodiments, “amplification” includes amplification of at least some portion of DNA- and RNA-based nucleic acids alone, or in combination. The amplification reaction can include single or double-stranded nucleic acid substrates and can further including any of the amplification processes known to one of ordinary skill in the art. In some embodiments, the amplification reaction includes PCR.

[0216] As used herein, “amplification conditions” and its derivatives, refers to conditions suitable for amplifying one or more nucleic acid sequences. Such amplification can be linear or exponential. In some embodiments, the amplification conditions can include isothermal conditions or alternatively can include thermocycling conditions, or a combination of isothermal and thermocycling conditions. In some embodiments, the conditions suitable for amplifying one or more nucleic acid sequences includes PCR conditions. Typically, the amplification conditions refer to a reaction mixture that is sufficient to amplify nucleic acids such as one or more target sequences, or to amplify an amplified target sequence ligated to one or more adapters, e.g., an adapter-ligated amplified target sequence. Amplification conditions include a catalyst for amplification or for nucleic acid synthesis, for example a polymerase; a primer that possesses some degree of complementarity to the nucleic acid to be amplified; and nucleotides, such as deoxyribonucleotide triphosphates (dNTPs) to promote extension of the primer once hybridized to the nucleic acid. The amplification conditions can require hybridization or annealing of a primer to a nucleic acid, extension of the primer and a denaturing step in which the extended primer is separated from the nucleic acid sequence undergoing amplification. Typically, but not necessarily, amplification conditions can include thermocycling; in some embodiments, amplification conditions include a plurality of cycles where the steps of annealing, extending and separating are repeated. Typically, the amplification conditions include cations such as Mg²⁺ or Mn²⁺ (e.g., MgCl₂, etc) and can also include various modifiers of ionic strength.

[0217] As used herein, “target sequence” or “target sequence of interest” and its derivatives, refers to any single or double-stranded nucleic acid sequence that can be amplified or synthesized according to the disclosure, including any nucleic acid sequence suspected or expected to be present in a sample. In some embodiments, the target sequence is present in double-stranded form and includes at least a portion of the particular nucleotide sequence to be amplified or synthesized, or its complement, prior to the addition of target-specific primers or appended adapters. Target sequences can include the nucleic acids to which primers useful in the amplification or synthesis reaction can hybridize prior to extension by a polymerase. In some embodiments, the term refers to a nucleic acid sequence whose sequence identity, ordering or location of nucleotides is determined by one or more of the methods of the disclosure.

[0218] As defined herein, “sample” and its derivatives, is used in its broadest sense and includes any specimen, culture and the like that is suspected of including a target. In some embodiments, the sample comprises cDNA, RNA, PNA, LNA, chimeric, hybrid, or multiplex-forms of nucleic acids. The sample can include any biological, clinical, surgical, agricultural, atmospheric or aquatic-based specimen containing one or more nucleic acids. The term also includes any isolated nucleic acid sample such as expressed RNA, fresh-frozen or formalin-fixed paraffin-embedded nucleic acid specimen.

[0219] As used herein, “contacting” and its derivatives, when used in reference to two or more components, refers to any process whereby the approach, proximity, mixture or commingling of the referenced components is promoted or achieved without necessarily requiring physical contact of such components, and includes mixing of solutions containing any one or more of the referenced components with each other. The referenced components may be contacted in any particular order or combination and the particular order of recitation of components is not limiting. For example, “contacting A with B and C” encompasses embodiments where A is first contacted with B then C, as well as embodiments where C is contacted with A then B, as well as embodiments where a mixture of A and C is contacted with B, and the like. Furthermore, such contacting does not necessarily require that the end result of the contacting process be a mixture including all of the referenced components, as long as at some point during the contacting process all of the referenced components are simultaneously present or simultaneously included in the same mixture or solution. Where one or more of the referenced components to be contacted includes a plurality (e.g., “contacting a target sequence with a plurality of target-specific primers and a polymerase”), then each member of the plurality can be viewed as an individual component of the contacting process, such that the contacting can include contacting of any one or more members of the plurality with any other member of the plurality and/or with any other referenced component (e.g., some but not all of the plurality of target specific primers can be contacted with a target sequence, then a polymerase, and then with other members of the plurality of target-specific primers) in any order or combination.

[0220] As used herein, the term “primer” and its derivatives refer to any polynucleotide that can hybridize to a target sequence of interest. In some embodiments, the primer can also serve to prime nucleic acid synthesis. Typically, the primer functions as a substrate onto which nucleotides can be polymerized by a polymerase; in some embodiments, however, the primer can become incorporated into the synthesized nucleic acid strand and provide a site to which another primer can hybridize to prime synthesis of a new strand that is complementary to the synthesized nucleic acid molecule. The primer may be comprised of any combination of nucleotides or analogs thereof, which may be optionally linked to form a linear polymer of any suitable length. In some embodiments, the primer is a single-stranded oligonucleotide or polynucleotide. (For purposes of this disclosure, the terms ‘polynucleotide” and “oligonucleotide” are used interchangeably herein and do not necessarily indicate any difference in length between the two). In some embodiments, the primer is single-stranded but it can also be double-stranded. The primer optionally occurs naturally, as in a purified restriction digest, or can be produced synthetically. In some embodiments, the primer acts as a point of initiation for amplification or synthesis when exposed to amplification or synthesis conditions; such amplification or synthesis can occur in a template-dependent fashion and optionally results in formation of a primer extension product that is complementary to at least a portion of the target sequence. Exemplary amplification or synthesis conditions can include contacting the primer with a polynucleotide template (e.g., a template including a target sequence), nucleotides and an inducing agent such as a polymerase at a suitable temperature and pH to induce polymerization of nucleotides onto an end of the target-specific primer. If double-stranded, the primer can optionally be treated to separate its strands before being used to prepare primer extension products. In some embodiments, the primer is an oligodeoxyribonucleotide or an oligoribonucleotide. In some embodiments, the primer can include one or more nucleotide analogs. The exact length and/or composition, including sequence, of the target-specific primer can influence many properties, including melting temperature (T m), GC content, formation of secondary structures, repeat nucleotide motifs, length of predicted primer extension products, extent of coverage across a nucleic acid molecule of interest, number of primers present in a single amplification or synthesis reaction, presence of nucleotide analogs or modified nucleotides within the primers, and the like. In some embodiments, a primer can be paired with a compatible primer within an amplification or synthesis reaction to form a primer pair consisting or a forward primer and a reverse primer. In some embodiments, the forward primer of the primer pair includes a sequence that is substantially complementary to at least a portion of a strand of a nucleic acid molecule, and the reverse primer of the primer of the primer pair includes a sequence that is substantially identical to at least of portion of the strand. In some embodiments, the forward primer and the reverse primer are capable of hybridizing to opposite strands of a nucleic acid duplex. Optionally, the forward primer primes synthesis of a first nucleic acid strand, and the reverse primer primes synthesis of a second nucleic acid strand, wherein the first and second strands are substantially complementary to each other, or can hybridize to form a double-stranded nucleic acid molecule. In some embodiments, one end of an amplification or synthesis product is defined by the forward primer and the other end of the amplification or synthesis product is defined by the reverse primer. In some embodiments, where the amplification or synthesis of lengthy primer extension products is required, such as amplifying an exon, coding region, or gene, several primer pairs can be created than span the desired length to enable sufficient amplification of the region. In some embodiments, a primer can include one or more cleavable groups. In some embodiments, primer lengths are in the range of about 10 to about 60 nucleotides, about 12 to about 50 nucleotides and about 15 to about 40 nucleotides in length. Typically, a primer is capable of hybridizing to a corresponding target sequence and undergoing primer extension when exposed to amplification conditions in the presence of dNTPs and a polymerase. In some embodiments, the primer includes one or more cleavable groups at one or more locations within the primer.

[0221] As used herein, “target-specific primer” and its derivatives, refers to a single stranded or double-stranded polynucleotide, typically an oligonucleotide, that includes at least one sequence that is at least 50% complementary, typically at least 75% complementary or at least 85% complementary, more typically at least 90% complementary, more typically at least 95% complementary, more typically at least 98% or at least 99% complementary, or identical, to at least a portion of a nucleic acid molecule that includes a target sequence. In such instances, the target-specific primer and target sequence are described as “corresponding” to each other. In some embodiments, the target-specific primer is capable of hybridizing to at least a portion of its corresponding target sequence (or to a complement of the target sequence); such hybridization can optionally be performed under standard hybridization conditions or under stringent hybridization conditions. In some embodiments, the target-specific primer is not capable of hybridizing to the target sequence, or to its complement, but is capable of hybridizing to a portion of a nucleic acid strand including the target sequence, or to its complement. In some embodiments, the target-specific primer includes at least one sequence that is at least 75% complementary, typically at least 85% complementary, more typically at least 90% complementary, more typically at least 95% complementary, more typically at least 98% complementary, or more typically at least 99% complementary, to at least a portion of the target sequence itself; in other embodiments, the target-specific primer includes at least one sequence that is at least 75% complementary, typically at least 85% complementary, more typically at least 90% complementary, more typically at least 95% complementary, more typically at least 98% complementary, or more typically at least 99% complementary, to at least a portion of the nucleic acid molecule other than the target sequence. In some embodiments, the target-specific primer is substantially non-complementary to other target sequences present in the sample; optionally, the target-specific primer is substantially non-complementary to other nucleic acid molecules present in the sample. In some embodiments, nucleic acid molecules present in the sample that do not include or correspond to a target sequence (or to a complement of the target sequence) are referred to as “non-specific” sequences or “non-specific nucleic acids”. In some embodiments, the target-specific primer is designed to include a nucleotide sequence that is substantially complementary to at least a portion of its corresponding target sequence. In some embodiments, a target-specific primer is at least 95% complementary, or at least 99% complementary, or identical, across its entire length to at least a portion of a nucleic acid molecule that includes its corresponding target sequence. In some embodiments, a target-specific primer is at least 90%, at least 95% complementary, at least 98% complementary or at least 99% complementary, or identical, across its entire length to at least a portion of its corresponding target sequence. In some embodiments, a forward target-specific primer and a reverse target-specific primer define a target-specific primer pair that are used to amplify the target sequence via template-dependent primer extension. Typically, each primer of a target-specific primer pair includes at least one sequence that is substantially complementary to at least a portion of a nucleic acid molecule including a corresponding target sequence but that is less than 50% complementary to at least one other target sequence in the sample. In some embodiments, amplification is performed using multiple target-specific primer pairs in a single amplification reaction, wherein each primer pair includes a forward target-specific primer and a reverse target-specific primer, each including at least one sequence that substantially complementary or substantially identical to a corresponding target sequence in the sample, and each primer pair having a different corresponding target sequence. In some embodiments, the target-specific primer is substantially non-complementary at its 3′ end or its 5′ end to any other target-specific primer present in an amplification reaction. In some embodiments, the target-specific primer can include minimal cross hybridization to other target-specific primers in the amplification reaction. In some embodiments, target-specific primers include minimal cross-hybridization to non-specific sequences in the amplification reaction mixture. In some embodiments, the target-specific primers include minimal self-complementarity. In some embodiments, the target-specific primers can include one or more cleavable groups located at the 3′ end. In some embodiments, the target-specific primers can include one or more cleavable groups located near or about a central nucleotide of the target-specific primer. In some embodiments, one of more targets-specific primers includes only non-cleavable nucleotides at the 5′ end of the target-specific primer. In some embodiments, a target specific primer includes minimal nucleotide sequence overlap at the 3′ end or the 5′ end of the primer as compared to one or more different target-specific primers, optionally in the same amplification reaction. In some embodiments 1, 2, 3, 4, 5, 6, 7, 8, 9, 10 or more, target-specific primers in a single reaction mixture include one or more of the above embodiments. In some embodiments, substantially all of the plurality of target-specific primers in a single reaction mixture includes one or more of the above embodiments.

[0222] As used herein, “polymerase” and its derivatives, refers to any enzyme that can catalyze the polymerization of nucleotides (including analogs thereof) into a nucleic acid strand. Typically but not necessarily, such nucleotide polymerization can occur in a template-dependent fashion. Such polymerases can include without limitation naturally occurring polymerases and any subunits and truncations thereof, mutant polymerases, variant polymerases, recombinant, fusion or otherwise engineered polymerases, chemically modified polymerases, synthetic molecules or assemblies, and any analogs, derivatives or fragments thereof that retain the ability to catalyze such polymerization. Optionally, the polymerase is a mutant polymerase comprising one or more mutations involving the replacement of one or more amino acids with other amino acids, the insertion or deletion of one or more amino acids from the polymerase, or the linkage of parts of two or more polymerases. Typically, the polymerase comprises one or more active sites at which nucleotide binding and/or catalysis of nucleotide polymerization can occur. Some exemplary polymerases include without limitation DNA polymerases and RNA polymerases. The term “polymerase” and its variants, as used herein, also refers to fusion proteins comprising at least two portions linked to each other, where the first portion comprises a peptide that can catalyze the polymerization of nucleotides into a nucleic acid strand and is linked to a second portion that comprises a second polypeptide. In some embodiments, the second polypeptide can include a reporter enzyme or a processivity-enhancing domain. Optionally, the polymerase can possess 5′ exonuclease activity or terminal transferase activity. In some embodiments, the polymerase is optionally reactivated, for example through the use of heat, chemicals or re-addition of new amounts of polymerase into a reaction mixture. In some embodiments, the polymerase can include a hot-start polymerase or an aptamer based polymerase that optionally is reactivated.

[0223] As used herein, the term “nucleotide” and its variants comprises any compound, including without limitation any naturally occurring nucleotide or analog thereof, which can bind selectively to, or is polymerized by, a polymerase. Typically, but not necessarily, selective binding of the nucleotide to the polymerase is followed by polymerization of the nucleotide into a nucleic acid strand by the polymerase; occasionally however the nucleotide may dissociate from the polymerase without becoming incorporated into the nucleic acid strand. Such nucleotides include not only naturally occurring nucleotides but also any analogs, regardless of their structure, that can bind selectively to, or can be polymerized by, a polymerase. While naturally occurring nucleotides typically comprise base, sugar and phosphate moieties, the nucleotides of the present disclosure can include compounds lacking any one, some or all of such moieties. In some embodiments, the nucleotide can optionally include a chain of phosphorus atoms comprising three, four, five, six, seven, eight, nine, ten or more phosphorus atoms. In some embodiments, the phosphorus chain is attached to any carbon of a sugar ring, such as the 5′ carbon. The phosphorus chain can be linked to the sugar with an intervening O or S. In one embodiment, one or more phosphorus atoms in the chain can be part of a phosphate group having P and O. In another embodiment, the phosphorus atoms in the chain is linked together with intervening O, NH, S, methylene, substituted methylene, ethylene, substituted ethylene, CNH₂, C(O), C(CH₂), CH₂CH₂, or C(OH)CH₂R (where R can be a 4-pyridine or 1-imidazole). In one embodiment, the phosphorus atoms in the chain has side groups having O, BH₃, or S. In the phosphorus chain, a phosphorus atom with a side group other than O can be a substituted phosphate group. In the phosphorus chain, phosphorus atoms with an intervening atom other than O can be a substituted phosphate group. Some examples of nucleotide analogs are described in U.S. Pat. No. 7,405,281. In some embodiments, the nucleotide comprises a label and referred to herein as a “labeled nucleotide”; the label of the labeled nucleotide is referred to herein as a “nucleotide label.” In some embodiments, the label is in the form of a fluorescent dye attached to the terminal phosphate group, i.e., the phosphate group most distal from the sugar. Some examples of nucleotides that can be used in the disclosed methods and compositions include, but are not limited to, ribonucleotides, deoxyribonucleotides, modified ribonucleotides, modified deoxyribonucleotides, ribonucleotide polyphosphates, deoxyribonucleotide polyphosphates, modified ribonucleotide polyphosphates, modified deoxyribonucleotide polyphosphates, peptide nucleotides, modified peptide nucleotides, metallonucleosides, phosphonate nucleosides, and modified phosphate-sugar backbone nucleotides, analogs, derivatives, or variants of the foregoing compounds, and the like. In some embodiments, the nucleotide can comprise non-oxygen moieties such as, for example, thio- or borano-moieties, in place of the oxygen moiety bridging the alpha phosphate and the sugar of the nucleotide, or the alpha and beta phosphates of the nucleotide, or the beta and gamma phosphates of the nucleotide, or between any other two phosphates of the nucleotide, or any combination thereof. “Nucleotide 5′-triphosphate” refers to a nucleotide with a triphosphate ester group at the 5′ position, and are sometimes denoted as “NTP”, or “dNTP” and “ddNTP” to particularly point out the structural features of the ribose sugar. The triphosphate ester group can include sulfur substitutions for the various oxygens, e.g. alpha-thio-nucleotide 5′-triphosphates. For a review of nucleic acid chemistry, see: Shabarova, Z. and Bogdanov, A. Advanced Organic Chemistry of Nucleic Acids, VCH, New York, 1994.

[0224] The term “extension” and its variants, as used herein, when used in reference to a given primer, comprises any in vivo or in vitro enzymatic activity characteristic of a given polymerase that relates to polymerization of one or more nucleotides onto an end of an existing nucleic acid molecule. Typically but not necessarily such primer extension occurs in a template-dependent fashion; during template-dependent extension, the order and selection of bases is driven by established base pairing rules, which can include Watson-Crick type base pairing rules or alternatively (and especially in the case of extension reactions involving nucleotide analogs) by some other type of base pairing paradigm. In one non-limiting example, extension occurs via polymerization of nucleotides on the 3′OH end of the nucleic acid molecule by the polymerase.

[0225] The term “portion” and its variants, as used herein, when used in reference to a given nucleic acid molecule, for example a primer or a template nucleic acid molecule, comprises any number of contiguous nucleotides within the length of the nucleic acid molecule, including the partial or entire length of the nucleic acid molecule.

[0226] The terms “identity” and “identical” and their variants, as used herein, when used in reference to two or more nucleic acid sequences, refer to similarity in sequence of the two or more sequences (e.g., nucleotide or polypeptide sequences). In the context of two or more homologous sequences, the percent identity or homology of the sequences or subsequences thereof indicates the percentage of all monomeric units (e.g., nucleotides or amino acids) that are the same (i.e., about 70% identity, preferably 75%, 80%, 85%, 90%, 95%, 98% or 99% identity). The percent identity can be over a specified region, when compared and aligned for maximum correspondence over a comparison window, or designated region as measured using a BLAST or BLAST 2.0 sequence comparison algorithms with default parameters described below, or by manual alignment and visual inspection. Sequences are said to be “substantially identical” when there is at least 85% identity at the amino acid level or at the nucleotide level. Preferably, the identity exists over a region that is at least about 25, 50, or 100 residues in length, or across the entire length of at least one compared sequence. A typical algorithm for determining percent sequence identity and sequence similarity are the BLAST and BLAST 2.0 algorithms, which are described in Altschul et al, Nuc. Acids Res. 25:3389-3402 (1977). Other methods include the algorithms of Smith & Waterman, Adv. Appl. Math. 2:482 (1981), and Needleman & Wunsch, J. Mol. Biol. 48:443 (1970), etc. Another indication that two nucleic acid sequences are substantially identical is that the two molecules or their complements hybridize to each other under stringent hybridization conditions.

[0227] The terms “complementary” and “complement” and their variants, as used herein, refer to any two or more nucleic acid sequences (e.g., portions or entireties of template nucleic acid molecules, target sequences and/or primers) that can undergo cumulative base pairing at two or more individual corresponding positions in antiparallel orientation, as in a hybridized duplex. Such base pairing can proceed according to any set of established rules, for example according to Watson-Crick base pairing rules or according to some other base pairing paradigm. Optionally there can be “complete” or “total” complementarity between a first and second nucleic acid sequence where each nucleotide in the first nucleic acid sequence can undergo a stabilizing base pairing interaction with a nucleotide in the corresponding antiparallel position on the second nucleic acid sequence. “Partial” complementarity describes nucleic acid sequences in which at least 20%, but less than 100%, of the residues of one nucleic acid sequence are complementary to residues in the other nucleic acid sequence. In some embodiments, at least 50%, but less than 100%, of the residues of one nucleic acid sequence are complementary to residues in the other nucleic acid sequence. In some embodiments, at least 70%, 80%, 90%, 95% or 98%, but less than 100%, of the residues of one nucleic acid sequence are complementary to residues in the other nucleic acid sequence. Sequences are said to be “substantially complementary” when at least 85% of the residues of one nucleic acid sequence are complementary to residues in the other nucleic acid sequence. In some embodiments, two complementary or substantially complementary sequences are capable of hybridizing to each other under standard or stringent hybridization conditions. “Non-complementary” describes nucleic acid sequences in which less than 20% of the residues of one nucleic acid sequence are complementary to residues in the other nucleic acid sequence. Sequences are said to be “substantially non-complementary” when less than 15% of the residues of one nucleic acid sequence are complementary to residues in the other nucleic acid sequence. In some embodiments, two non-complementary or substantially non-complementary sequences cannot hybridize to each other under standard or stringent hybridization conditions. A “mismatch” is present at any position in the sequences where two opposed nucleotides are not complementary. Complementary nucleotides include nucleotides that are efficiently incorporated by DNA polymerases opposite each other during DNA replication under physiological conditions. In a typical embodiment, complementary nucleotides can form base pairs with each other, such as the A-T/U and G-C base pairs formed through specific Watson-Crick type hydrogen bonding, or base pairs formed through some other type of base pairing paradigm, between the nucleobases of nucleotides and/or polynucleotides in positions antiparallel to each other. The complementarity of other artificial base pairs can be based on other types of hydrogen bonding and/or hydrophobicity of bases and/or shape complementarity between bases.

[0228] As used herein, “amplified target sequences” and its derivatives, refers to a nucleic acid sequence produced by the amplification of/amplifying the target sequences using target-specific primers and the methods provided herein. The amplified target sequences may be either of the same sense (the positive strand produced in the second round and subsequent even-numbered rounds of amplification) or antisense (i.e., the negative strand produced during the first and subsequent odd-numbered rounds of amplification) with respect to the target sequences. In some embodiments, the amplified target sequences is less than 50% complementary to any portion of another amplified target sequence in the reaction. In other embodiments, the amplified target sequences is greater than 50%, greater than 60%, greater than 70%, greater than 80%, or greater than 90% complementary to any portion of another amplified target sequence in the reaction.

[0229] As used herein, the terms “ligating”, “ligation” and their derivatives refer to the act or process for covalently linking two or more molecules together, for example, covalently linking two or more nucleic acid molecules to each other. In some embodiments, ligation includes joining nicks between adjacent nucleotides of nucleic acids. In some embodiments, ligation includes forming a covalent bond between an end of a first and an end of a second nucleic acid molecule. In some embodiments, for example embodiments wherein the nucleic acid molecules to be ligated include conventional nucleotide residues, the ligation can include forming a covalent bond between a 5′ phosphate group of one nucleic acid and a 3′ hydroxyl group of a second nucleic acid thereby forming a ligated nucleic acid molecule. In some embodiments, any means for joining nicks or bonding a 5′phosphate to a 3′ hydroxyl between adjacent nucleotides can be employed. In an exemplary embodiment, an enzyme such as a ligase is used. For the purposes of this disclosure, an amplified target sequence can be ligated to an adapter to generate an adapter-ligated amplified target sequence.

[0230] As used herein, “ligase” and its derivatives, refers to any agent capable of catalyzing the ligation of two substrate molecules. In some embodiments, the ligase includes an enzyme capable of catalyzing the joining of nicks between adjacent nucleotides of a nucleic acid. In some embodiments, the ligase includes an enzyme capable of catalyzing the formation of a covalent bond between a 5′ phosphate of one nucleic acid molecule to a 3′ hydroxyl of another nucleic acid molecule thereby forming a ligated nucleic acid molecule. In some embodiments, the ligase is an isothermal ligase. In some embodiments, the ligase is a thermostable ligase. Suitable ligases may include, but not limited to, T4 DNA ligase, T4 RNA ligase, and E. coli DNA ligase.

[0231] As used herein, “ligation conditions” and its derivatives, refers to conditions suitable for ligating two molecules to each other. In some embodiments, the ligation conditions are suitable for sealing nicks or gaps between nucleic acids. As defined herein, a “nick” or “gap” refers to a nucleic acid molecule that lacks a directly bound 5′ phosphate of a mononucleotide pentose ring to a 3′ hydroxyl of a neighboring mononucleotide pentose ring within internal nucleotides of a nucleic acid sequence. As used herein, the term nick or gap is consistent with the use of the term in the art. Typically, a nick or gap is ligated in the presence of an enzyme, such as ligase at an appropriate temperature and pH. In some embodiments, T4 DNA ligase can join a nick between nucleic acids at a temperature of about 70-72° C.

[0232] As used herein, “blunt-end ligation” and its derivatives, refers to ligation of two blunt-end double-stranded nucleic acid molecules to each other. A “blunt end” refers to an end of a double-stranded nucleic acid molecule wherein substantially all of the nucleotides in the end of one strand of the nucleic acid molecule are base paired with opposing nucleotides in the other strand of the same nucleic acid molecule. A nucleic acid molecule is not blunt ended if it has an end that includes a single-stranded portion greater than two nucleotides in length, referred to herein as an “overhang”. In some embodiments, the end of nucleic acid molecule does not include any single stranded portion, such that every nucleotide in one strand of the end is based paired with opposing nucleotides in the other strand of the same nucleic acid molecule. In some embodiments, the ends of the two blunt ended nucleic acid molecules that become ligated to each other do not include any overlapping, shared or complementary sequence. Typically, blunted-end ligation excludes the use of additional oligonucleotide adapters to assist in the ligation of the double-stranded amplified target sequence to the double-stranded adapter, such as patch oligonucleotides as described in US Pat. Publication No. 2010/0129874. In some embodiments, blunt-ended ligation includes a nick translation reaction to seal a nick created during the ligation process.

[0233] As used herein, the terms “adapter” or “adapter and its complements” and their derivatives, refers to any linear oligonucleotide which is ligated to a nucleic acid molecule of the disclosure. Optionally, the adapter includes a nucleic acid sequence that is not substantially complementary to the 3′ end or the 5′ end of at least one target sequences within the sample. In some embodiments, the adapter is substantially non-complementary to the 3′ end or the 5′ end of any target sequence present in the sample. In some embodiments, the adapter includes any single stranded or double-stranded linear oligonucleotide that is not substantially complementary to an amplified target sequence. In some embodiments, the adapter is substantially non-complementary to at least one, some or all of the nucleic acid molecules of the sample. In some embodiments, suitable adapter lengths are in the range of about 10-100 nucleotides, about 12-60 nucleotides and about 15-50 nucleotides in length. An adapter can include any combination of nucleotides and/or nucleic acids. In some embodiments, the adapter can include one or more cleavable groups at one or more locations. In another embodiment, the adapter can include a sequence that is substantially identical, or substantially complementary, to at least a portion of a primer, for example a universal primer. The structure and properties of universal amplification primers are well known to those skilled in the art and can be implemented for utilization in conjunction with provided methods and compositions to adapt to specific analysis platforms (e.g., as described herein universal P1 and A primers have been described in the art and utilized for sequencing on Ion Torrent sequencing platforms). Similarly, additional and other universal adaptor/primer sequences described and known in the art (e.g., Illumina universal adaptor/primer sequences, PacBio universal adaptor/primer sequences, etc.) can be used in conjunction with the methods and compositions provided herein. In some embodiments, the adapter can include a barcode or tag to assist with downstream cataloguing, identification or sequencing. In some embodiments, a single-stranded adapter can act as a substrate for amplification when ligated to an amplified target sequence, particularly in the presence of a polymerase and dNTPs under suitable temperature and pH.

[0234] In some embodiments, an adapter is ligated to a polynucleotide through a blunt-end ligation. In other embodiments, an adapter is ligated to a polynucleotide via nucleotide overhangs on the ends of the adapter and the polynucleotide. For overhang ligation, an adapter may have a nucleotide overhang added to the 3′ and/or 5′ ends of the respective strands if the polynucleotides to which the adapters are to be ligated (eg, amplicons) have a complementary overhang added to the 3′ and/or 5′ ends of the respective strands. For example, adenine nucleotides can be added to the 3′ terminus of an end-repaired PCR product. Adapters having with an overhang formed by thymine nucleotides can then dock with the A-overhang of the amplicon and be ligated to the amplicon by a DNA ligase, such as T4 DNA ligase.

[0235] As used herein, “reamplifying” or “reamplification” and their derivatives refer to any process whereby at least a portion of an amplified nucleic acid molecule is further amplified via any suitable amplification process (referred to in some embodiments as a “secondary” amplification or “reamplification”, thereby producing a reamplified nucleic acid molecule. The secondary amplification need not be identical to the original amplification process whereby the amplified nucleic acid molecule was produced; nor need the reamplified nucleic acid molecule be completely identical or completely complementary to the amplified nucleic acid molecule; all that is required is that the reamplified nucleic acid molecule include at least a portion of the amplified nucleic acid molecule or its complement. For example, the reamplification can involve the use of different amplification conditions and/or different primers, including different target-specific primers than the primary amplification.

[0236] As defined herein, a “cleavable group” refers to any moiety that once incorporated into a nucleic acid can be cleaved under appropriate conditions. For example, a cleavable group can be incorporated into a target-specific primer, an amplified sequence, an adapter or a nucleic acid molecule of the sample. In an exemplary embodiment, a target-specific primer can include a cleavable group that becomes incorporated into the amplified product and is subsequently cleaved after amplification, thereby removing a portion, or all, of the target-specific primer from the amplified product. The cleavable group can be cleaved or otherwise removed from a target-specific primer, an amplified sequence, an adapter or a nucleic acid molecule of the sample by any acceptable means. For example, a cleavable group can be removed from a target-specific primer, an amplified sequence, an adapter or a nucleic acid molecule of the sample by enzymatic, thermal, photo-oxidative or chemical treatment. In one embodiment, a cleavable group can include a nucleobase that is not naturally occurring. For example, an oligodeoxyribonucleotide can include one or more RNA nucleobases, such as uracil that can be removed by a uracil glycosylase. In some embodiments, a cleavable group can include one or more modified nucleobases (such as 7-methylguanine, 8-oxo-guanine, xanthine, hypoxanthine, 5,6-dihydrouracil or 5-methylcytosine) or one or more modified nucleosides (i.e., 7-methylguanosine, 8-oxo-deoxyguanosine, xanthosine, inosine, dihydrouridine or 5-methylcytidine). The modified nucleobases or nucleotides can be removed from the nucleic acid by enzymatic, chemical or thermal means. In one embodiment, a cleavable group can include a moiety that can be removed from a primer after amplification (or synthesis) upon exposure to ultraviolet light (i.e., bromodeoxyuridine). In another embodiment, a cleavable group can include methylated cytosine. Typically, methylated cytosine can be cleaved from a primer for example, after induction of amplification (or synthesis), upon sodium bisulfate treatment. In some embodiments, a cleavable moiety can include a restriction site. For example, a primer or target sequence can include a nucleic acid sequence that is specific to one or more restriction enzymes, and following amplification (or synthesis), the primer or target sequence can be treated with the one or more restriction enzymes such that the cleavable group is removed. Typically, one or more cleavable groups can be included at one or more locations with a target-specific primer, an amplified sequence, an adapter or a nucleic acid molecule of the sample.

[0237] As used herein, “cleavage step” and its derivatives, refers to any process by which a cleavable group is cleaved or otherwise removed from a target-specific primer, an amplified sequence, an adapter or a nucleic acid molecule of the sample. In some embodiments, the cleavage step involves a chemical, thermal, photo-oxidative or digestive process.

[0238] As used herein, the term “hybridization” is consistent with its use in the art, and refers to the process whereby two nucleic acid molecules undergo base pairing interactions. Two nucleic acid molecule molecules are said to be hybridized when any portion of one nucleic acid molecule is base paired with any portion of the other nucleic acid molecule; it is not necessarily required that the two nucleic acid molecules be hybridized across their entire respective lengths and in some embodiments, at least one of the nucleic acid molecules can include portions that are not hybridized to the other nucleic acid molecule. The phrase “hybridizing under stringent conditions” and its variants refers to conditions under which hybridization of a target-specific primer to a target sequence occurs in the presence of high hybridization temperature and low ionic strength. In one exemplary embodiment, stringent hybridization conditions include an aqueous environment containing about 30 mM magnesium sulfate, about 300 mM Tris-sulfate at pH 8.9, and about 90 mM ammonium sulfate at about 60-68° C., or equivalents thereof. As used herein, the phrase “standard hybridization conditions” and its variants refers to conditions under which hybridization of a primer to an oligonucleotide (i.e., a target sequence), occurs in the presence of low hybridization temperature and high ionic strength. In one exemplary embodiment, standard hybridization conditions include an aqueous environment containing about 100 mM magnesium sulfate, about 500 mM Tris-sulfate at pH 8.9, and about 200 mM ammonium sulfate at about 50-55° C., or equivalents thereof.

[0239] As used herein, “GC content” and its derivatives, refers to the cytosine and guanine content of a nucleic acid molecule. The GC content of a target-specific primer (or adapter) of the disclosure is 85% or lower. More typically, the GC content of a target-specific primer or adapter of the disclosure is between 15-85%.

[0240] As used herein, the term “end” and its variants, when used in reference to a nucleic acid molecule, for example a target sequence or amplified target sequence, can include the terminal 30 nucleotides, the terminal 20 and even more typically the terminal 15 nucleotides of the nucleic acid molecule. A linear nucleic acid molecule comprised of linked series of contiguous nucleotides typically includes at least two ends. In some embodiments, one end of the nucleic acid molecule can include a 3′ hydroxyl group or its equivalent, and is referred to as the “3′ end” and its derivatives. Optionally, the 3′ end includes a 3′ hydroxyl group that is not linked to a 5′ phosphate group of a mononucleotide pentose ring. Typically, the 3′ end includes one or more 5′ linked nucleotides located adjacent to the nucleotide including the unlinked 3′ hydroxyl group, typically the 30 nucleotides located adjacent to the 3′ hydroxyl, typically the terminal 20 and even more typically the terminal 15 nucleotides. One or more linked nucleotides can be represented as a percentage of the nucleotides present in the oligonucleotide or can be provided as a number of linked nucleotides adjacent to the unlinked 3′ hydroxyl. For example, the 3′ end can include less than 50% of the nucleotide length of the oligonucleotide. In some embodiments, the 3′ end does not include any unlinked 3′ hydroxyl group but can include any moiety capable of serving as a site for attachment of nucleotides via primer extension and/or nucleotide polymerization. In some embodiments, the term “3′ end” for example when referring to a target-specific primer, can include the terminal 10 nucleotides, the terminal 5 nucleotides, the terminal 4, 3, 2 or fewer nucleotides at the 3′end. In some embodiments, the term “3′ end” when referring to a target-specific primer can include nucleotides located at nucleotide positions 10 or fewer from the 3′ terminus.

[0241] As used herein, “5′ end”, and its derivatives, refers to an end of a nucleic acid molecule, for example a target sequence or amplified target sequence, which includes a free 5′ phosphate group or its equivalent. In some embodiments, the 5′ end includes a 5′ phosphate group that is not linked to a 3′ hydroxyl of a neighboring mononucleotide pentose ring. Typically, the 5′ end includes to one or more linked nucleotides located adjacent to the 5′ phosphate, typically the 30 nucleotides located adjacent to the nucleotide including the 5′ phosphate group, typically the terminal 20 and even more typically the terminal 15 nucleotides. One or more linked nucleotides can be represented as a percentage of the nucleotides present in the oligonucleotide or can be provided as a number of linked nucleotides adjacent to the 5′ phosphate. For example, the 5′ end can be less than 50% of the nucleotide length of an oligonucleotide. In another exemplary embodiment, the 5′ end can include about 15 nucleotides adjacent to the nucleotide including the terminal 5′ phosphate. In some embodiments, the 5′ end does not include any unlinked 5′ phosphate group but can include any moiety capable of serving as a site of attachment to a 3′ hydroxyl group, or to the 3′end of another nucleic acid molecule. In some embodiments, the term “5′ end” for example when referring to a target-specific primer, can include the terminal 10 nucleotides, the terminal 5 nucleotides, the terminal 4, 3, 2 or fewer nucleotides at the 5′end. In some embodiments, the term “5′ end” when referring to a target-specific primer can include nucleotides located at positions 10 or fewer from the 5′ terminus. In some embodiments, the 5′ end of a target-specific primer can include only non-cleavable nucleotides, for example nucleotides that do not contain one or more cleavable groups as disclosed herein, or a cleavable nucleotide as would be readily determined by one of ordinary skill in the art.

[0242] As used herein, “DNA barcode” and its derivatives, refers to a unique short (e.g., 6-14 nucleotide) nucleic acid sequence within an adapter that can act as a ‘key’ to distinguish or separate a plurality of amplified target sequences in a sample. For the purposes of this disclosure, a DNA barcode can be incorporated into the nucleotide sequence of an adapter.

[0243] As used herein, the phrases “two rounds of target-specific hybridization” or “two rounds of target-specific selection” and their derivatives refers to any process whereby the same target sequence is subjected to two consecutive rounds of hybridization-based target-specific selection, wherein a target sequence is hybridized to a target-specific sequence. Each round of hybridization based target-specific selection can include multiple target-specific hybridizations to at least some portion of a target-specific sequence. In one exemplary embodiment, a round of target-specific selection includes a first target-specific hybridization involving a first region of the target sequence and a second target-specific hybridization involving a second region of the target sequence. The first and second regions can be the same or different. In some embodiments, each round of hybridization-based target-specific selection can include use of two target specific oligonucleotides (e.g., a forward target-specific primer and a reverse target-specific primer), such that each round of selection includes two target-specific hybridizations.

[0244] As used herein, “comparable maximal minimum melting temperatures” and its derivatives, refers to the melting temperature (T m) of each nucleic acid fragment for a single adapter or target-specific primer after cleavage of the cleavable groups. The hybridization temperature of each nucleic acid fragment generated by a single adapter or target-specific primer is compared to determine the maximal minimum temperature required preventing hybridization of any nucleic acid fragment from the target-specific primer or adapter to the target sequence. Once the maximal hybridization temperature is known, it is possible to manipulate the adapter or target-specific primer, for example by moving the location of the cleavable group along the length of the primer, to achieve a comparable maximal minimum melting temperature with respect to each nucleic acid fragment.

[0245] As used herein, “addition only” and its derivatives, refers to a series of steps in which reagents and components are added to a first or single reaction mixture. Typically, the series of steps excludes the removal of the reaction mixture from a first vessel to a second vessel in order to complete the series of steps. An addition only process excludes the manipulation of the reaction mixture outside the vessel containing the reaction mixture. Typically, an addition-only process is amenable to automation and high-throughput.

[0246] As used herein, “synthesizing” and its derivatives, refers to a reaction involving nucleotide polymerization by a polymerase, optionally in a template-dependent fashion. Polymerases synthesize an oligonucleotide via transfer of a nucleoside monophosphate from a nucleoside triphosphate (NTP), deoxynucleoside triphosphate (dNTP) or dideoxynucleoside triphosphate (ddNTP) to the 3′ hydroxyl of an extending oligonucleotide chain. For the purposes of this disclosure, synthesizing includes to the serial extension of a hybridized adapter or a target-specific primer via transfer of a nucleoside monophosphate from a deoxynucleoside triphosphate.

[0247] As used herein, “polymerizing conditions” and its derivatives, refers to conditions suitable for nucleotide polymerization. In typical embodiments, such nucleotide polymerization is catalyzed by a polymerase. In some embodiments, polymerizing conditions include conditions for primer extension, optionally in a template-dependent manner, resulting in the generation of a synthesized nucleic acid sequence. In some embodiments, the polymerizing conditions include PCR. Typically, the polymerizing conditions include use of a reaction mixture that is sufficient to synthesize nucleic acids and includes a polymerase and nucleotides. The polymerizing conditions can include conditions for annealing of a target-specific primer to a target sequence and extension of the primer in a template dependent manner in the presence of a polymerase. In some embodiments, polymerizing conditions are practiced using thermocycling. Additionally, polymerizing conditions can include a plurality of cycles where the steps of annealing, extending, and separating the two nucleic strands are repeated. Typically, the polymerizing conditions include a cation such as MgCl₂. Polymerization of one or more nucleotides to form a nucleic acid strand includes that the nucleotides be linked to each other via phosphodiester bonds, however, alternative linkages may be possible in the context of particular nucleotide analogs.

[0248] As used herein, the term “nucleic acid” refers to natural nucleic acids, artificial nucleic acids, analogs thereof, or combinations thereof, including polynucleotides and oligonucleotides. As used herein, the terms “polynucleotide” and “oligonucleotide” are used interchangeably and mean single-stranded and double-stranded polymers of nucleotides including, but not limited to, 2′-deoxyribonucleotides (nucleic acid) and ribonucleotides (RNA) linked by internucleotide phosphodiester bond linkages, e.g. 3′-5′ and 2′-5′, inverted linkages, e.g. 3′-3′ and 5′-5′, branched structures, or analog nucleic acids. Polynucleotides have associated counter ions, such as H⁺, NH⁴⁺, trialkylammonium, Mg²⁺, Na⁺ and the like. An oligonucleotide can be composed entirely of deoxyribonucleotides, entirely of ribonucleotides, or chimeric mixtures thereof. Oligonucleotides can be comprised of nucleobase and sugar analogs. Polynucleotides typically range in size from a few monomeric units, e.g. 5-40, when they are more commonly frequently referred to in the art as oligonucleotides, to several thousands of monomeric nucleotide units, when they are more commonly referred to in the art as polynucleotides; for purposes of this disclosure, however, both oligonucleotides and polynucleotides may be of any suitable length. Unless denoted otherwise, whenever a oligonucleotide sequence is represented, it will be understood that the nucleotides are in 5′ to 3′ order from left to right and that “A” denotes deoxyadenosine, “C” denotes deoxycytidine, “G” denotes deoxyguanosine, “T” denotes thymidine, and “U” denotes deoxyuridine. Oligonucleotides are said to have “5′ ends” and “3′ ends” because mononucleotides are typically reacted to form oligonucleotides via attachment of the 5′ phosphate or equivalent group of one nucleotide to the 3′ hydroxyl or equivalent group of its neighboring nucleotide, optionally via a phosphodiester or other suitable linkage.

[0249] As defined herein, the term “nick translation” and its variants comprise the translocation of one or more nicks or gaps within a nucleic acid strand to a new position along the nucleic acid strand. In some embodiments, a nick is formed when a double stranded adapter is ligated to a double stranded amplified target sequence. In one example, the primer can include at its 5′ end, a phosphate group that can ligate to the double stranded amplified target sequence, leaving a nick between the adapter and the amplified target sequence in the complementary strand. In some embodiments, nick translation results in the movement of the nick to the 3′ end of the nucleic acid strand. In some embodiments, moving the nick can include performing a nick translation reaction on the adapter-ligated amplified target sequence. In some embodiments, the nick translation reaction is a coupled 5′ to 3′ DNA polymerization/degradation reaction, or coupled to a 5′ to 3′ DNA polymerization/strand displacement reaction. In some embodiments, moving the nick can include performing a DNA strand extension reaction at the nick site. In some embodiments, moving the nick can include performing a single strand exonuclease reaction on the nick to form a single stranded portion of the adapter-ligated amplified target sequence and performing a DNA strand extension reaction on the single stranded portion of the adapter-ligated amplified target sequence to a new position. In some embodiments, a nick is formed in the nucleic acid strand opposite the site of ligation.

[0250] As used herein, the term “polymerase chain reaction” (“PCR”) refers to the method of K. B. Mullis U.S. Pat. Nos. 4,683,195 and 4,683,202, hereby incorporated by reference, which describe a method for increasing the concentration of a segment of a polynucleotide of interest in a mixture of expressed RNA or cDNA without cloning or purification. This process for amplifying the polynucleotide of interest consists of introducing a large excess of two oligonucleotide primers to the DNA mixture containing the desired polynucleotide of interest, followed by a precise sequence of thermal cycling in the presence of a DNA polymerase. The two primers are complementary to their respective strands of the double stranded polynucleotide of interest. To effect amplification, the mixture is denatured and the primers then annealed to their complementary sequences within the polynucleotide of interest molecule. Following annealing, the primers are extended with a polymerase to form a new pair of complementary strands. The steps of denaturation, primer annealing and polymerase extension can be repeated many times (i.e., denaturation, annealing and extension constitute one “cycle”; there can be numerous “cycles”) to obtain a high concentration of an amplified segment of the desired polynucleotide of interest. The length of the amplified segment of the desired polynucleotide of interest (amplicon) is determined by the relative positions of the primers with respect to each other, and therefore, this length is a controllable parameter. By virtue of repeating the process, the method is referred to as the “PCR”. Because the desired amplified segments of the polynucleotide of interest become the predominant nucleic acid sequences (in terms of concentration) in the mixture, they are said to be “PCR amplified”. As defined herein, target nucleic acid molecules within a sample including a plurality of target nucleic acid molecules are amplified via PCR. In a modification to the method discussed above, the target nucleic acid molecules are PCR amplified using a plurality of different primer pairs, in some cases, one or more primer pairs per target nucleic acid molecule of interest, thereby forming a multiplex PCR reaction. In some embodiments provided herein, multiplex PCR amplifications are performed using a plurality of different primer pairs, in typical cases, one primer pair per target nucleic acid molecule. Using multiplex PCR, it is possible to simultaneously amplify multiple nucleic acid molecules of interest from a sample to form amplified target sequences. It is also possible to detect the amplified target sequences by several different methodologies (e.g., quantitation with a bioanalyzer or qPCR, hybridization with a labeled probe; incorporation of biotinylated primers followed by avidin-enzyme conjugate detection; incorporation of ³²P-labeled deoxynucleotide triphosphates, such as dCTP or dATP, into the amplified target sequence). Any oligonucleotide sequence can be amplified with the appropriate set of primers, thereby allowing for the amplification of target nucleic acid molecules from RNA, cDNA, formalin-fixed paraffin-embedded DNA, fine-needle biopsies and various other sources. In particular, the amplified target sequences created by the multiplex PCR process as disclosed herein, are themselves efficient substrates for subsequent PCR amplification or various downstream assays or manipulations.

[0251] As defined herein “multiplex amplification” refers to selective and non-random amplification of two or more target sequences within a sample using at least one target-specific primer. In some embodiments, multiplex amplification is performed such that some or all of the target sequences are amplified within a single reaction vessel. The “plexy” or “plex” of a given multiplex amplification refers to the number of different target-specific sequences that are amplified during that single multiplex amplification. In some embodiments, the plexy is about 12-plex, 24-plex, 48-plex, 74-plex, 96-plex, 120-plex, 144-plex, 168-plex, 192-plex, 216-plex, 240-plex, 264-plex, 288-plex, 312-plex, 336-plex, 360-plex, 384-plex, or 398-plex. In some embodiments, highly multiplexed amplification reactions include reactions with a plexy of greater than 12-plex.

[0252] In some embodiments, the amplified target sequences are formed via PCR. Extension of target-specific primers can be accomplished using one or more DNA polymerases. In one embodiment, the polymerase is any Family A DNA polymerase (also known as pol I family) or any Family B DNA polymerase. In some embodiments, the DNA polymerase is a recombinant form capable of extending target-specific primers with superior accuracy and yield as compared to a non-recombinant DNA polymerase. For example, the polymerase can include a high-fidelity polymerase or thermostable polymerase. In some embodiments, conditions for extension of target-specific primers can include ‘Hot Start’ conditions, for example Hot Start polymerases, such as Amplitaq Gold® DNA polymerase (Applied Biosciences), Platinum® Taq DNA Polymerase High Fidelity (Invitrogen) or KOD Hot Start DNA polymerase (EMD Biosciences). A ‘Hot Start’ polymerase includes a thermostable polymerase and one or more antibodies that inhibit DNA polymerase and 3′-5′ exonuclease activities at ambient temperature. In some instances, ‘Hot Start’ conditions can include an aptamer.

[0253] In some embodiments, the polymerase is an enzyme such as Taq polymerase (from Thermus aquaticus), Tfi polymerase (from Thermus filiformis), Bst polymerase (from Bacillus stearothermophilus), Pfu polymerase (from Pyrococcus furiosus), Tth polymerase (from Thermus thermophilus), Pow polymerase (from Pyrococcus woesei), Tli polymerase (from Thermococcus litoralis), Ultima polymerase (from Thermotoga maritima), KOD polymerase (from Thermococcus kodakaraensis), Pol I and II polymerases (from Pyrococcus abyssi) and Pab (from Pyrococcus abyssi). In some embodiments, the DNA polymerase can include at least one polymerase such as Amplitaq Gold® DNA polymerase (Applied Biosciences), Stoffel fragment of Amplitaq® DNA Polymerase (Roche), KOD polymerase (EMD Biosciences), KOD Hot Start polymerase (EMD Biosciences), Deep Vent™ DNA polymerase (New England Biolabs), Phusion polymerase (New England Biolabs), Klentaql polymerase (DNA Polymerase Technology, Inc), Klentaq Long Accuracy polymerase (DNA Polymerase Technology, Inc), Omni KlenTaq™ DNA polymerase (DNA Polymerase Technology, Inc), Omni KlenTaq™ LA DNA polymerase (DNA Polymerase Technology, Inc), Platinum® Taq DNA Polymerase (Invitrogen), Hemo Klentag™ (New England Biolabs), Platinum® Taq DNA Polymerase High Fidelity (Invitrogen), Platinum® Pfx (Invitrogen), Accuprime™ Pfx (Invitrogen), or Accuprime™ Taq DNA Polymerase High Fidelity (Invitrogen).

[0254] In some embodiments, the DNA polymerase is a thermostable DNA polymerase. In some embodiments, the mixture of dNTPs is applied concurrently, or sequentially, in a random or defined order. In some embodiments, the amount of DNA polymerase present in the multiplex reaction is significantly higher than the amount of DNA polymerase used in a corresponding single plex PCR reaction. As defined herein, the term “significantly higher” refers to an at least 3-fold greater concentration of DNA polymerase present in the multiplex PCR reaction as compared to a corresponding single plex PCR reaction.

[0255] In some embodiments, the amplification reaction does not include a circularization of amplification product, for example as disclosed by rolling circle amplification.

[0256] The practice of the present subject matter may employ, unless otherwise indicated, conventional techniques and descriptions of organic chemistry, molecular biology (including recombinant techniques), cell biology, and biochemistry, which are within the skill of the art. Such conventional techniques include, but are not limited to, preparation of synthetic polynucleotides, polymerization techniques, chemical and physical analysis of polymer particles, preparation of nucleic acid libraries, nucleic acid sequencing and analysis, and the like. Specific illustrations of suitable techniques can be used by reference to the examples provided herein. Other equivalent conventional procedures can also be used. Such conventional techniques and descriptions can be found in standard laboratory manuals such as Genome Analysis: A Laboratory Manual Series (Vols. I-IV), PCR Primer: A Laboratory Manual, and Molecular Cloning: A Laboratory Manual (all from Cold Spring Harbor Laboratory Press), Hermanson, Bioconjugate Techniques, Second Edition (Academic Press, 2008); Merkus, Particle Size Measurements (Springer, 2009); Rubinstein and Colby, Polymer Physics (Oxford University Press, 2003); and the like.

[0257] According to various exemplary embodiments, one or more features of any one or more of the above-discussed teachings and/or exemplary embodiments may be performed or implemented using appropriately configured and/or programmed hardware and/or software elements. Determining whether an embodiment is implemented using hardware and/or software elements may be based on any number of factors, such as desired computational rate, power levels, heat tolerances, processing cycle budget, input data rates, output data rates, memory resources, data bus speeds, etc., and other design or performance constraints.

[0258] Examples of hardware elements may include processors, microprocessors, input(s) and/or output(s) (I/O) device(s) (or peripherals) that are communicatively coupled via a local interface circuit, circuit elements (e.g., transistors, resistors, capacitors, inductors, and so forth), integrated circuits, application specific integrated circuits (ASIC), programmable logic devices (PLD), digital signal processors (DSP), field programmable gate array (FPGA), logic gates, registers, semiconductor device, chips, microchips, chip sets, and so forth. The local interface may include, for example, one or more buses or other wired or wireless connections, controllers, buffers (caches), drivers, repeaters and receivers, etc., to allow appropriate communications between hardware components. A processor is a hardware device for executing software, particularly software stored in memory. The processor can be any custom made or commercially available processor, a central processing unit (CPU), an auxiliary processor among several processors associated with the computer, a semiconductor based microprocessor (e.g., in the form of a microchip or chip set), a macroprocessor, or any device for executing software instructions. A processor can also represent a distributed processing architecture. The I/O devices can include input devices, for example, a keyboard, a mouse, a scanner, a microphone, a touch screen, an interface for various medical devices and/or laboratory instruments, a bar code reader, a stylus, a laser reader, a radio-frequency device reader, etc. Furthermore, the I/O devices also can include output devices, for example, a printer, a bar code printer, a display, etc. Finally, the I/O devices further can include devices that communicate as both inputs and outputs, for example, a modulator/demodulator (modem; for accessing another device, system, or network), a radio frequency (RF) or other transceiver, a telephonic interface, a bridge, a router, etc.

[0259] Examples of software may include software components, programs, applications, computer programs, application programs, system programs, machine programs, operating system software, middleware, firmware, software modules, routines, subroutines, functions, methods, procedures, software interfaces, application program interfaces (API), instruction sets, computing code, computer code, code segments, computer code segments, words, values, symbols, or any combination thereof. A software in memory may include one or more separate programs, which may include ordered listings of executable instructions for implementing logical functions. The software in memory may include a system for identifying data streams in accordance with the present teachings and any suitable custom made or commercially available operating system (O/S), which may control the execution of other computer programs such as the system, and provides scheduling, input-output control, file and data management, memory management, communication control, etc.

[0260] According to various exemplary embodiments, one or more features of any one or more of the above-discussed teachings and/or exemplary embodiments may be performed or implemented using appropriately configured and/or programmed non-transitory machine-readable medium or article that may store an instruction or a set of instructions that, if executed by a machine, may cause the machine to perform a method and/or operations in accordance with the exemplary embodiments. Such a machine may include, for example, any suitable processing platform, computing platform, computing device, processing device, computing system, processing system, computer, processor, scientific or laboratory instrument, etc., and may be implemented using any suitable combination of hardware and/or software. The machine-readable medium or article may include, for example, any suitable type of memory unit, memory device, memory article, memory medium, storage device, storage article, storage medium and/or storage unit, for example, memory, removable or non-removable media, erasable or non-erasable media, writeable or re-writeable media, digital or analog media, hard disk, floppy disk, read-only memory compact disc (CD-ROM), recordable compact disc (CD-R), rewriteable compact disc (CD-RW), optical disk, magnetic media, magneto-optical media, removable memory cards or disks, various types of Digital Versatile Disc (DVD), a tape, a cassette, etc., including any medium suitable for use in a computer. Memory can include any one or a combination of volatile memory elements (e.g., random access memory (RAM, such as DRAM, SRAM, SDRAM, etc.)) and nonvolatile memory elements (e.g., ROM, EPROM, EEROM, Flash memory, hard drive, tape, CDROM, etc.). Moreover, memory can incorporate electronic, magnetic, optical, and/or other types of storage media. Memory can have a distributed architecture where various components are situated remote from one another, but are still accessed by the processor. The instructions may include any suitable type of code, such as source code, compiled code, interpreted code, executable code, static code, dynamic code, encrypted code, etc., implemented using any suitable high-level, low-level, object-oriented, visual, compiled and/or interpreted programming language.

[0261] According to various exemplary embodiments, one or more features of any one or more of the above-discussed teachings and/or exemplary embodiments may be performed or implemented at least partly using a distributed, clustered, remote, or cloud computing resource.

[0262] According to various exemplary embodiments, one or more features of any one or more of the above-discussed teachings and/or exemplary embodiments may be performed or implemented using a source program, executable program (object code), script, or any other entity comprising a set of instructions to be performed. When a source program, the program can be translated via a compiler, assembler, interpreter, etc., which may or may not be included within the memory, so as to operate properly in connection with the O/S. The instructions may be written using (a) an object oriented programming language, which has classes of data and methods, or (b) a procedural programming language, which has routines, subroutines, and/or functions, which may include, for example, C, C++, Pascal, Basic, Fortran, Cobol, Perl, Java, and Ada.

[0263] According to various exemplary embodiments, one or more of the above-discussed exemplary embodiments may include transmitting, displaying, storing, printing or outputting to a user interface device, a computer readable storage medium, a local computer system or a remote computer system, information related to any information, signal, data, and/or intermediate or final results that may have been generated, accessed, or used by such exemplary embodiments. Such transmitted, displayed, stored, printed or outputted information can take the form of searchable and/or filterable lists of runs and reports, pictures, tables, charts, graphs, spreadsheets, correlations, sequences, and combinations thereof, for example.

[0264] Various additional exemplary embodiments may be derived by repeating, adding, or substituting any generically or specifically described features and/or components and/or substances and/or steps and/or operating conditions set forth in one or more of the above-described exemplary embodiments. Further, it should be understood that an order of steps or order for performing certain actions is immaterial so long as the objective of the steps or action remains achievable, unless specifically stated otherwise. Furthermore, two or more steps or actions can be conducted simultaneously so long as the objective of the steps or action remains achievable, unless specifically stated otherwise. Moreover, any one or more feature, component, aspect, step, or other characteristic mentioned in one of the above-discussed exemplary embodiments may be considered to be a potential optional feature, component, aspect, step, or other characteristic of any other of the above-discussed exemplary embodiments so long as the objective of such any other of the above-discussed exemplary embodiments remains achievable, unless specifically stated otherwise.

[0265] In certain embodiments, compositions of the invention comprise target BCR primer sets wherein the primers are directed to sequences of the same target BCR gene. In some embodiments the immune receptor is an antibody receptor selected from the group consisting of heavy chain alpha, heavy chain delta, heavy chain epsilon, heavy chain gamma, heavy chain mu, light chain kappa, and light chain lambda. In some embodiments, a target BCR primer set can be combined with a primer set directed to a TCR selected from the group consisting of TCR alpha, TCR beta, TCR gamma, and TCR delta.

[0266] In some embodiments, compositions of the invention comprise target BCR primer sets selected to have various parameters or criteria outlined herein. In some embodiments, compositions of the invention comprise a plurality of target-specific primers (e.g., V gene FR2- and FR3-directed primers, the J gene directed primers, the Cint-KDE directed primers) of about 15 nucleotides to about 40 nucleotides in length and having at least two or more following criteria: a cleavable group located at a 3′ end of substantially all of the plurality of primers, a cleavable group located near or about a central nucleotide of substantially all of the plurality of primers, substantially all of the plurality of primers at a 5′ end including only non-cleavable nucleotides, minimal cross-hybridization to substantially all of the primers in the plurality of primers, minimal cross-hybridization to non-specific sequences present in a sample, minimal self-complementarity, and minimal nucleotide sequence overlap at a 3′ end or a 5′ end of substantially all of the primers in the plurality of primers. In some embodiments, the composition can include primers with any 3, 4, 5, 6 or 7 of the above criteria.

[0267] In some embodiments, composition comprise a plurality of target-specific primers of about 15 nucleotides to about 40 nucleotides in length having two or more of the following criteria: a cleavable group located near or about a central nucleotide of substantially all of the plurality of primers, substantially all of the plurality of primers at a 5′ end including only non-cleavable nucleotides, substantially all of the plurality of primers having less than 20% of the nucleotides across the primer's entire length containing a cleavable group, at least one primer having a complementary nucleic acid sequence across its entire length to a target sequence present in a sample, minimal cross-hybridization to substantially all of the primers in the plurality of primers, minimal cross-hybridization to non-specific sequences present in a sample, and minimal nucleotide sequence overlap at a 3′ end or a 5′ end of substantially all of the primers in the plurality of primers. In some embodiments, the composition can include primers with any 3, 4, 5, 6 or 7 of the above criteria.

[0268] In some embodiments, target-specific primers (e.g., the V gene FR2- and FR3-directed primers, the J gene directed primers, and the Cint-KDE gene directed primers) used in the compositions of the invention are selected or designed to satisfy any one or more of the following criteria: (1) includes two or more modified nucleotides within the primer sequence, at least one of which is included near or at the termini of the primer and at least one of which is included at, or about the center nucleotide position of the primer sequence; (2) length of about 15 to about 40 bases in length; (3) Tₘ of from above 60° C. to about 70° C.; (4) low cross-reactivity with non-target sequences present in the sample; (5) at least the first four nucleotides (going from 3′ to 5′ direction) are non-complementary to any sequence within any other primer present in the composition; and (6) non-complementary to any consecutive stretch of at least 5 nucleotides within any other sequence targeted for amplification with the primers. In some embodiments, the target-specific primers used in the compositions are selected or designed to satisfy any 2, 3, 4, 5, or 6 of the above criteria. In some embodiments, the two or more modified nucleotides have cleavable groups. In some embodiments, each of the plurality of target-specific primers comprises two or more modified nucleotides selected from a cleavable group of methylguanine, 8-oxo-guanine, xanthine, hypoxanthine, 5,6-dihydrouracil, uracil, 5-methylcytosine, thymine-dimer, 7-methylguanosine, 8-oxo-deoxyguanosine, xanthosine, inosine, dihydrouridine, bromodeoxyuridine, uridine or 5-methylcytidine.

[0269] In some embodiments compositions are provided for analysis of an immune repertoire in a sample, comprising at least one set of i) a plurality of V gene primers directed to a majority of different V genes of at least one BCR coding sequence comprising at least a portion of framework region 3 (FR3) within the V gene; and ii) one or more J gene primers directed to at least a portion of a respective target C gene of the BCR coding sequence, wherein each set of i) and ii) primers directed to the same target immune receptor sequences is selected from the group consisting of IgH, IgLkappa, and IgLlambda and wherein each set of i) and ii) primers directed to the same target BCR is configured to amplify the target BCR repertoire. In certain embodiments a single set of primers comprising i) and ii) is encompassed within a composition. In more particular embodiments such set comprises primers directed to IgH. In still other embodiments at least two sets of primers are encompassed in a composition wherein the sets are directed to IgH and IgLkappa and IgLlambda.

[0270] In some embodiments compositions are provided for analysis of a BCR repertoire in a sample, comprising at least one set of i) a plurality of V gene primers directed to a majority of different V genes of at least one BCR coding sequence comprising at least a portion of framework region 3 (FR3) within the V gene; and ii) a plurality of J gene primers directed to a majority of different J genes of the respective target BCR coding sequence, wherein each set of i) and ii) primers directed to the same target immune receptor sequences is selected from the group consisting of IgH, IgLkappa and IgLlambda and wherein each set of i) and ii) primers directed to the same target immune receptor is configured to amplify the target BCR repertoire. In certain embodiments a single set of primers comprising i) and ii) is encompassed within a composition. In more particular embodiments such set comprises primers directed to IgH. In still other embodiments at least two sets of primers are encompassed in a composition wherein the sets are directed to IgH and IgLkappa and IgLlambda. In still other embodiments three sets of primers are encompassed in a composition wherein the sets are directed to IgH and IgLkappa and IgLlambda.

[0271] In particular embodiments, compositions provided include target BCR primer sets comprising V gene primers wherein the one or more of a plurality of V gene primers are directed to sequences over an FR3 region about 50 nucleotides in length. In other embodiments the one or more of a plurality of V gene primers are directed to sequences over an FR3 region about 70 nucleotides in length. In other particular embodiments the one or more of a plurality of V gene primers are directed to sequences over an FR3 region about 40 to about 60 nucleotides in length. In some embodiments a target BCR primer set comprises V gene primers comprising about 50 to about 85 different FR3-directed primers. In certain embodiments a target BCR primer set comprises V gene primers comprising about 55 to about 80 different FR3-directed primers. In some embodiments a target BCR primer set comprises V gene primers comprising about 62 to about 75 different FR3-directed primers. In some embodiments, a target BCR primer set comprises V gene primers comprising about 65, 66, 67, 68, 69, or 70 different FR3-directed primers. In some embodiments the target BCR primer set comprises a plurality of J gene primers. In some embodiments a target BCR primer set comprises at least 2 J gene primers wherein each is directed to at least a portion of a J gene within target polynucleotides. In certain embodiments a target BCR primer set comprises 2 to about 8 J gene primers wherein each is directed to at least a portion of a J gene within target polynucleotides. In some embodiments a target BCR primer set comprises about 3 to about 6 different J gene primers wherein each is directed to at least a portion of a J gene within target polynucleotides. In some embodiments a target BCR primer set comprises about 2, 3, 4, 5, 6, 7 or 8 different J gene primers wherein each is directed to at least a portion of a J gene within target polynucleotides. In some embodiments a target BCR primer set comprises about 4 J gene primers wherein each is directed to at least a portion of the J gene portion within target polynucleotides.

[0272] In particular embodiments, methods of the invention comprise the use of at least one set of primers comprising V gene primers of BCR IgH coding sequence and J gene primers of BCR IgH coding sequence i), and V gene primers of BCR IgLlambda coding sequence and J gene primers of BCR IgLlambda coding sequence ii), and V gene primers of BCR IgIgLkappa coding sequence and J gene primers of BCR IgLkappa coding sequence iii), and optionally Cint sequence primers and KDE sequence primers iv), selected from Tables 9 and 6 and Tables 3-4 and Tables 1-2 and Table 5, respectively.

[0273] In particular embodiments, methods of the invention comprise the use of at least one set of primers comprising V gene primers of BCR IgH FR2 coding sequence and J gene primers of BCR IgH coding sequence i), and/or V gene primers of BCR IgH distal FR3 coding sequence and J gene primers of BCR IgH coding sequence ii), selected from Tables 8 and 6 and Tables 7 and 6, respectively.

[0274] In certain embodiments compositions of the invention comprise at least one set of primers i) and ii) and iii), optionally iv) comprising primers selected from SEQ ID NOs1161-1446 and 973-988 and SEQ ID Nos 597-910 and 911-950 and SEQ ID Nos 1-548 and 549-596 and optionally selected from SEQ ID Nos 951-972. In other certain embodiments compositions of the invention comprise at least one set of primers i) and ii) comprising primers selected from SEQ ID 1304-1446 and 981-988 and SEQ ID Nos 785-816, 847-876 and 931-935, 941-945 and SEQ ID Nos 406-456 and 557-580-596 and optionally selected from SEQ ID Nos 960, 961 and 972.

[0275] In certain embodiments compositions of the invention comprise at least one set of primers i) and ii) comprising primers selected from SEQ ID NOs: 1065-1160 and 973-988 or selected from SEQ ID NOs: 1065-1112 and 981-988. In other certain embodiments compositions of the invention comprise at least one set of primers i) and ii) comprising primers selected from SEQ ID NOs: 989-1064 and 973-988 or selected from SEQ ID NOs: 1027-1064 and 981-988.

[0276] In some embodiments, multiple different primers including at least one modified nucleotide can be used in a single amplification reaction. For example, multiplexed primers including modified nucleotides can be added to the amplification reaction mixture, where each primer (or set of primers) selectively hybridizes to, and promotes amplification of different rearranged target nucleic acid molecules within the nucleic acid population. In some embodiments, the target specific primers can include at least one uracil nucleotide.

[0277] In some embodiments, multiplex amplification may be performed using PCR and cycles of denaturation, primer annealing, and polymerase extension steps at set temperatures for set times. In some embodiments, about 12 cycles to about 30 cycles are used to generate the amplicon library in the multiplex amplification reaction. In some embodiments, 13 cycles, 14 cycles, 15 cycles, 16 cycles, 17 cycles, 18 cycles, 19 cycles, preferably 20 cycles, 23 cycles, or 25 cycles are used to generate the amplicon library in the multiplex amplification reaction. In some embodiments, 17-25 cycles are used to generate the amplicon library in the multiplex amplification reaction.

[0278] In some embodiments, the amplification reactions are conducted in parallel within a single reaction phase (for example, within the same amplification reaction mixture within a single well or tube). In some instances, an amplification reaction can generate a mixture of products including both the intended amplicon product as well as unintended, unwanted, nonspecific amplification artifacts such as primer-dimers. Post amplification, the reactions are then treated with any suitable agent that will selectively cleave or otherwise selectively destroy the nucleotide linkages of the modified nucleotides within the excess unincorporated primers and the amplification artifacts without cleaving or destroying the specification amplification products. For example, the primers can include uracil-containing nucleobases that can be selectively cleaved using UNG/UDG (optionally with heat and/or alkali). In some embodiments, the primers can include uracil-containing nucleotides that can be selectively cleaved using UNG and Fpg. In some embodiments, the cleavage treatment includes exposure to oxidizing conditions for selective cleavage of dithiols, treatment with RNAse H for selective cleavage of modified nucleotides including RNA-specific moieties (e.g., ribose sugars, etc.), and the like. This cleavage treatment can effectively fragment the original amplification primers and non-specific amplification products into small nucleic acid fragments that include relatively few nucleotides each. Such fragments are typically incapable of promoting further amplification at elevated temperatures. Such fragments can also be removed relatively easily from the reaction pool through the various post-amplification cleanup procedures known in the art (e.g., spin columns, NaEtOH precipitation, etc).

[0279] In some embodiments, amplification products following cleavage or other selective destruction of the nucleotide linkages of the modified nucleotides are optionally treated to generate amplification products that possess a phosphate at the 5′ termini. In some embodiments, the phosphorylation treatment includes enzymatic manipulation to produce 5′ phosphorylated amplification products. In one embodiment, enzymes such as polymerases can be used to generate 5′ phosphorylated amplification products. For example, T4 polymerase can be used to prepare 5′ phosphorylated amplicon products. Klenow can be used in conjunction with one or more other enzymes to produce amplification products with a 5′ phosphate. In some embodiments, other enzymes known in the art can be used to prepare amplification products with a 5′ phosphate group. For example, incubation of uracil nucleotide containing amplification products with the enzyme UDG, Fpg and T4 polymerase can be used to generate amplification products with a phosphate at the 5′ termini. It will be apparent to one of skill in the art that other techniques, other than those specifically described herein, can be applied to generate phosphorylated amplicons. It is understood that such variations and modifications that are applied to practice the methods, systems, kits, compositions and apparatuses disclosed herein, without resorting to undue experimentation are considered within the scope of the disclosure.

[0280] In some embodiments, primers that are incorporated in the intended (specific) amplification products, these primers are similarly cleaved or destroyed, resulting in the formation of “sticky ends” (e.g., 5′ or 3′ overhangs) within the specific amplification products. Such “sticky ends” can be addressed in several ways. For example, if the specific amplification products are to be cloned, the overhang regions can be designed to complement overhangs introduced into the cloning vector, thereby enabling sticky ended ligations that are more rapid and efficient than blunt ended ligations. Alternatively, the overhangs may need to be repaired (as with several next-generation sequencing methods). Such repair can be accomplished either through secondary amplification reactions using only forward and reverse amplification primers (e.g., correspond to A and P1 primers) comprised of only natural bases. In this manner, subsequent rounds of amplification rebuild the double-stranded templates, with nascent copies of the amplicon possessing the complete sequence of the original strands prior to primer destruction. Alternatively, the sticky ends can be removed using some forms of fill-in and ligation processing, wherein the forward and reverse primers are annealed to the templates. A polymerase can then be employed to extend the primers, and then a ligase, optionally a thermostable ligase, can be utilized to connect the resulting nucleic acid strands. This could obviously be also accomplished through various other reaction pathways, such as cyclical extend-ligation, etc. In some embodiments, the ligation step can be performed using one or more DNA ligases.

[0281] In some embodiments, the amplicon library prepared using target—specific primer pairs can be used in downstream enrichment applications such as emulsion PCR, bridge PCR or isothermal amplification. In some embodiments, the amplicon library can be used in an enrichment application and a sequencing application. For example, an amplicon library can be sequenced using any suitable DNA sequencing platform, including any suitable next generation DNA sequencing platform. In some embodiments, an amplicon library can be sequenced using an Ion PGM Sequencer or an Ion GeneStudio S5 Sequencer (Thermo Fisher Scientific). In some embodiments, a PGM Sequencer or an S5 Sequencer can be coupled to server that applies parameters or software to determine the sequence of the amplified target nucleic acid molecules. In some embodiments, the amplicon library can be prepared, enriched and sequenced in less than 24 hours. In some embodiments, the amplicon library can be prepared, enriched and sequenced in approximately 9 hours.

[0282] In some embodiments, methods for generating an amplicon library can include: amplifying cDNA of immune receptor genes using V gene-specific and C gene-specific primers to generate amplicons; purifying the amplicons from the input DNA and primers; phosphorylating the amplicons; ligating adapters to the phosphorylated amplicons; purifying the ligated amplicons; nick-translating the amplified amplicons; and purifying the nick-translated amplicons to generate the amplicon library. In some embodiments, methods for generating an amplicon library can include: amplifying cDNA of immune receptor genes using V gene-specific and J gene-specific primers to generate amplicons; purifying the amplicons from the input DNA and primers; phosphorylating the amplicons; ligating adapters to the phosphorylated amplicons; purifying the ligated amplicons; nick-translating the amplified amplicons; and purifying the nick-translated amplicons to generate the amplicon library. In some embodiments, additional amplicon library manipulations can be conducted following the step of amplification of rearranged immune receptor gene targets to generate the amplicons. In some embodiments, any combination of additional reactions can be conducted in any order, and can include: purifying; phosphorylating; ligating adapters; nick-translating; amplification and/or sequencing. In some embodiments, any of these reactions can be omitted or can be repeated. It will be readily apparent to one of skill in the art that the method can repeat or omit any one or more of the above steps. It will also be apparent to one of skill in the art that the order and combination of steps may be modified to generate the required amplicon library, and is not therefore limited to the exemplary methods provided.

[0283] A phosphorylated amplicon can be joined to an adapter to conduct a nick translation reaction, subsequent downstream amplification (e.g., template preparation), or for attachment to particles (e.g., beads), or both. For example, an adapter that is joined to a phosphorylated amplicon can anneal to an oligonucleotide capture primer which is attached to a particle, and a primer extension reaction can be conducted to generate a complimentary copy of the amplicon attached to the particle or surface, thereby attaching an amplicon to a surface or particle. Adapters can have one or more amplification primer hybridization sites, sequencing primer hybridization sites, barcode sequences, and combinations thereof. In some embodiments, amplicons prepared by the methods disclosed herein can be joined to one or more Ion Torrent™ compatible adapters to construct an amplicon library. Amplicons generated by such methods can be joined to one or more adapters for library construction to be compatible with a next generation sequencing platform. For example, the amplicons produced by the teachings of the present disclosure can be attached to adapters provided in the Ion AmpliSeg™ Library Kit 2.0 or Ion AmpliSeg™ Library Kit Plus (Thermo Fisher Scientific).

[0284] In some embodiments, amplification of immune receptor cDNA or rearranged gDNA can be conducted using a 5×Ion AmpliSeg™ HiFi Master Mix. In some embodiments, the 5×Ion AmpliSeg™ HiFi Master Mix can include glycerol, dNTPs, and a DNA polymerase such as Platinum™ Taq DNA polymerase High Fidelity. In some embodiments, the 5×Ion AmpliSeqm™ HiFi Master Mix can further include at least one of the following: a preservative, magnesium chloride, magnesium sulfate, tris-sulfate and/or ammonium sulfate.

[0285] In some embodiments, the immune receptor rearranged gDNA multiplex amplification reaction further includes at least one PCR additive to improve on-target amplification, amplification yield, and/or the percentage of productive sequencing reads. In some embodiments, the at least one PCR additive includes at least one of potassium chloride or additional dNTPs (e.g., dATP, dCTP, dGTP, dTTP). In some embodiments, the dNTPs as a PCR additive is an equimolar mixture of dNTPs. In some embodiments, the dNTP mix as a PCR additive is an equimolar mixture of dATP, dCTP, dGTP, and dTTP. In some embodiments, about 0.2 mM to about 5.0 mM dNTPs is added to the multiplex amplification reaction. In some embodiments, amplification of rearranged immune receptor gDNA can be conducted using a 5× Ion AmpliSeg™ HiFi Master Mix and an additional about 0.2 mM to about 5.0 mM dNTPs in the reaction mixture. In some embodiments, amplification of rearranged immune receptor gDNA can be conducted using a 5× Ion AmpliSeg™ HiFi Master Mix and an additional about 0.5 mM to about 4 mM, about 0.5 mM to about 3 mM, about 0.5 mM to about 2.5 mM, about 0.5 mM to about 1.0 mM, about 0.75 mM to about 1.25 mM, about 1.0 mM to about 1.5 mM, about 1.0 to about 2.0 mM, about 2.0 mM to about 3.0 mM, about 1.25 to about 1.75 mM, about 1.3 to about 1.8 mM, about 1.4 mM to about 1.7 mM, or about 1.5 to about 2.0 mM dNTPs in the reaction mixture. In some embodiments, amplification of rearranged immune receptor gDNA can be conducted using a 5× Ion AmpliSeg™ HiFi Master Mix and an additional about 0.2 mM, about 0.4 mM, about 0.6 mM, about 0.8 mM, about 1.0 mM, about 1.2 mM, about 1.4 mM, about 1.6 mM, about 1.8 mM, about 2.0 mM, about 2.2 mM, about 2.4 mM, about 2.6 mM, about 2.8 mM, about 3.0 mM, about 3.5 mM, or about 4.0 mM dNTPs in the reaction mixture. In some embodiments, about 10 mM to about 200 mM potassium chloride is added to the multiplex amplification reaction. In some embodiments, amplification of rearranged immune receptor gDNA can be conducted using a 5× Ion AmpliSeg™ HiFi Master Mix and an additional about 10 mM to about 200 mM potassium chloride in the reaction mixture. In some embodiments, amplification of rearranged immune receptor gDNA can be conducted using a 5× Ion AmpliSeg™ HiFi Master Mix and an additional about 10 mM to about 60 mM, about 20 mM to about 70 mM, about 30 mM to about 80 mM, about 40 mM to about 90 mM, about 50 mM to about 100 mM, about 60 mM to about 120 mM, about 80 mM to about 140 mM, about 50 mM to about 150 mM, about 150 mM to about 200 mM or about 100 mM to about 200 mM potassium chloride in the reaction mixture. In some embodiments, amplification of rearranged immune receptor gDNA can be conducted using a 5× Ion AmpliSeg™ HiFi Master Mix and an additional about 10 mM, about 20 mM, about 30 mM, about 40 mM, about 50 mM, about 60 mM, about 70 mM, about 80 mM, about 90 mM, about 100 mM, about 120 mM, about 140 mM, about 150 mM, about 160 mM, about 180 mM, or about 200 mM potassium chloride in the reaction mixture.

[0286] In some embodiments, phosphorylation of the amplicons can be conducted using a FuPa reagent. In some embodiments, the FuPa reagent can include a DNA polymerase, a DNA ligase, at least one uracil cleaving or modifying enzyme, and/or a storage buffer. In some embodiments, the FuPa reagent can further include at least one of the following: a preservative and/or a detergent.

[0287] In some embodiments, phosphorylation of the amplicons can be conducted using a FuPa reagent. In some embodiments, the FuPa reagent can include a DNA polymerase, at least one uracil cleaving or modifying enzyme, an antibody and/or a storage buffer. In some embodiments, the FuPa reagent can further include at least one of the following: a preservative and/or a detergent. In some embodiments, the antibody is provided to inhibit the DNA polymerase and 3′-5′ exonuclease activities at ambient temperature.

[0288] In some embodiments, the amplicon library produced by the teachings of the present disclosure are sufficient in yield to be used in a variety of downstream applications including the Ion Chef™ instrument and the Ion S5™ Sequencing Systems (Thermo Fisher Scientific).

[0289] It will be apparent to one of ordinary skill in the art that numerous other techniques, platforms or methods for clonal amplification such as wildfire PCR and bridge amplification can be used in conjunction with the amplified target sequences of the present disclosure. It is also envisaged that one of ordinary skill in art upon further refinement or optimization of the conditions provided herein can proceed directly to nucleic acid sequencing (for example using Ion PGM™ System or Ion S5™ System or Ion Proton™ System sequencers, Thermo Fisher Scientific) without performing a clonal amplification step.

[0290] In some embodiments, at least one of the amplified targets sequences to be clonally amplified can be attached to a support or particle. The support can be comprised of any suitable material and have any suitable shape, including, for example, planar, spheroid or particulate. In some embodiments, the support is a scaffolded polymer particle as described in U.S. Published App. No. 20100304982, hereby incorporated by reference in its entirety.

[0291] In some embodiments, a kit is provided for amplifying multiple immune receptor expression sequences from a population of nucleic acid molecules in a single reaction. In some embodiments, the kit includes a plurality of target-specific primer pairs containing one or more cleavable groups, one or more DNA polymerases, a mixture of dNTPs and at least one cleaving reagent. In one embodiment, the cleavable group is 8-oxo-deoxyguanosine, deoxyuridine or bromodeoxyuridine. In some embodiments, the at least one cleaving reagent includes RNaseH, uracil DNA glycosylase, Fpg or alkali. In one embodiment, the cleaving reagent is uracil DNA glycosylase. In some embodiments, the kit is provided to perform multiplex PCR in a single reaction chamber or vessel. In some embodiments, the kit includes at least one DNA polymerase, which is a thermostable DNA polymerase. In some embodiments, the concentration of the one or more DNA polymerases is present in a 3-fold excess as compared to a single PCR reaction. In some embodiments, the final concentration of each target-specific primer pair is present at about 5 nM to about 2000 nM. In some embodiments, the final concentration of each target-specific primer pair is present at about 25 nM to about 50 nM or about 100 nM to about 800 nM. In some embodiments, the final concentration of each target-specific primer pair is present at about 50 nM to about 400 nM or about 50 nM to about 200 nM. In some embodiments, the final concentration of each target-specific primer pair is present at about 200 nM or about 400 nM. In some embodiments, the kit provides amplification of immune repertoire expression sequences from immunoglobulin heavy chain gamma, immunoglobulin heavy chain mu, immunoglobulin heavy chain alpha, immunoglobulin heavy chain delta, immunoglobulin heavy chain epsilon, immunoglobulin light chain lambda, or immunoglobulin light chain kappa from a population of nucleic acid molecules in a single reaction chamber. In particular embodiments, a provided kit is a test kit. In some embodiments, the kit further comprises one or more adapters, barcodes, and/or antibodies.

TABLE 1
IgL lambda V gene FR3

| | SEQ | | SEQ ID |
|---|---|---|---|
| Sequence | ID NO | Sequence | NO |
| ATCTCTGGGCTCCAGGCTG | 1 | GAGCCCAAGCCGGGGATGAG | 285 |
| ATCTCTGGGCTCTAGTCTG | 2 | GAGCCCAGGCTGGGGACGAG | 286 |
| ATTACTGGACTCCAGCCTG | 3 | GGGCCCAGGCAGATGATGAA | 287 |
| CTGTCAGGTGTGCAGCCTG | 4 | GAGTCCAGGCAGAAGACGAG | 288 |
| ATCTCCAACCTCCAGTTAG | 5 | GACTGAAGACTGAGGACGAG | 289 |
| ATCTCTGGGCTCCAGCCTG | 6 | CAATCCCGTCTGAGGATGGA | 290 |
| ATCTCTGGGCTCCAGTCTG | 7 | GGCTCTGGGCTGAGGACAAG | 291 |
| ATCAGCAGGGCTCAGACTG | 8 | ATGGGGGCACAGGATGGAAA | 292 |
| CTTTTGGGTGCGCAGCCTG | 9 | ATGGGGCACAGGATGGAAA | 293 |
| ATCACTGGACTCCAGTCTG | 10 | ACAGGGCCCAGGCTGGGA | 294 |
| ATCAGTGGGCTCCAGTCTG | 11 | CTGAGCAGCCTGAGATCAAG | 295 |
| ATCACTGGGGCCCAGGCTG | 12 | ACAGGGCCCAGGCTGGGGA | 296 |
| ATCTCCAACCTCCAGTCTG | 13 | ATGGGCCCCAGGCTGGAAA | 297 |
| ACCTCTGGGCTCCAGGCTG | 14 | GTGGGGCCCAGGCCAGGGA | 298 |
| CTTTCGGGTGCGCAGCCTG | 15 | TGTGCAGCCCGAGAGGTGAA | 299 |
| ATCTCTGGACTCCAGGCTG | 16 | GACTCCAGUCTGAGGAUGAG | 300 |
| ATCTCCGGGCTCCAGTCTG | 17 | GGCTCCAGUCTGAGGAUGAG | 301 |
| ATCACTGGGCTCCAGGCTG | 18 | ACCTCCAGUTAGAGGAUGAG | 302 |
| ATCTCCAACCTCCAGTTTG | 19 | ACCTCCAGUTTGAGGAUGAG | 303 |
| ATCTCGGGCCTCTAGCCTG | 20 | GGGCCCAGGCUGAGGAUGAG | 304 |
| ATCATCAGGGCTCAGACTG | 21 | GCCTCCAGUCTGAGGAUGAG | 305 |
| ATCTCCAGCCTCCAGTCTG | 22 | GGCTCCGGUCCGAGGAUGAG | 306 |
| GTCTCTGGGCTCCAGGCTG | 23 | GGCTCTAGUCTGAGGAUGAG | 307 |
| ATCAGTGGGCTCCGGTCCG | 24 | GGCTCCAGUCTGAAGAUGAG | 308 |
| CCATCAGCAGGGTCCTGACCG | 25 | GUGTGCAGCCUGAGGACGAG | 309 |
| CCATCAGTGGAGTCCAGGCAG | 26 | GCCUCTAGCCUGAGGACGAG | 310 |
| CCATCAGCAGGATCGAGGCTG | 27 | GTGCGCAGCCUGAGGAUGAG | 311 |
| TCATTTCTACAATCCCGTCTG | 28 | GGCUCCAGGCUGAGGACGAG | 312 |
| CCATCACTGGGGCTCAGGCGG | 29 | GACUCCAGCCUGAGGACGAG | 313 |
| TCATCTCTGGGCTCCAGCCTG | 30 | ACCTCCAGUCTGAGGAUGAG | 314 |
| CCATCACTGGGATTCAGGTTG | 31 | GGCTCCAGGCUGAGGAUGAG | 315 |
| CCATTAGCAGGGTCCTGACCA | 32 | GACUCCAGGCUGAGGACGAG | 316 |
| CCATCAGCGGGGCCCAGGTTG | 33 | GGGCUCAGACUGAGGACGAG | 317 |
| CCATCAGCAGGGTCGAAGCCG | 34 | GGCTCCAGCCUGAGGAUGAG | 318 |
| CCATCTCTGGCCTCCAGACCA | 35 | GGGUCCUGACCGAAGACGAG | 319 |
| CCATCACGGGGGCCCAGGCAG | 36 | GCCUCTGGCCUGAGGACGAG | 320 |
| GCATCACCGGACTCCAGACTG | 37 | GCCTCTGGCCUGAGGACUAG | 321 |
| CCATCAGTGGAGCCCAGGCTG | 38 | GGATCGAGGCUGGGGAUGAG | 322 |
| GCATCTCTGAGCTGCAGCCTG | 39 | GGGCCCAGGUGGAGGAUGAA | 323 |
| CCATCACTGGGGCTCAGGTTG | 40 | GGCTCAAGUCCGAGGTUGAG | 324 |
| CCATCTCTGGACTGAAGACTG | 41 | GCCTCCAGACCAAGGACAAG | 325 |
| CTATCAGTGGGGCCCAGGTGG | 42 | GGCUCCAGCCUGAGGACGAG | 326 |
| CCATCAAGAACATCCAGGAAG | 43 | GGGCCCAGGUTGAGGAUGAG | 327 |
| CCATCAGCAGAGCCCAAGCCG | 44 | GGGUCCUGACCAAAGGCGGG | 328 |
| CCATCTCTGGGCTCAAGTCCG | 45 | ACCTCCAGUCTGACGAUGAG | 329 |
| GCACCACTGGGCTCTGGGCTG | 46 | AGCUGCAGCCUGAGGACGAG | 330 |
| GCATCACTGGCCTCTGGCCTG | 47 | GGACCCAGGCUATGGAUGAG | 331 |
| CCATCAGCGGGACCCAGGCTA | 48 | GACUCCAGACUGGGGACGAG | 332 |
| CCATCAGTGGGGCCCAGGTGG | 49 | ACAUCCAGGAAGAAGAUGAG | 333 |
| CCTTCTCCAACCTCCAGTCTG | 50 | GGAUTCAGGTUGAAGACAAG | 334 |
| CTGATAATCAATGGGCCCCAG | 51 | GGGUCGAAGCCGGGGAUGAG | 335 |
| TGACCATTAGTGGGGCCCAG | 52 | GAGUCCAGGCAGAAGAUGAG | 336 |
| CTGACCATTAGTGGGGCCCAG | 53 | ACAUCCAGGAAGAGGAUGAG | 337 |
| GGCCATCAACAGGGCCCAG | 54 | GGGCUCAGGTTGAACAUGAA | 338 |
| CTGCACATTTCTGAGCAGCCTG | 55 | GGGCUCAGGCGGAAGAUGAG | 339 |
| TTGATTATTAATGGGGCACAG | 56 | GAGCCCAAGCCGGGGATGAG | 340 |
| TTGATTATTAATGGGGGCACAG | 57 | GAGCCCAGGCTGGGGACGAG | 341 |
| CTCTTGGGTGTGCAGCCCGA | 58 | GGGCCCAGGCAGAUGAUGAA | 342 |
| ATCTCTGGGCUCCAGGCUG | 59 | GAGTCCAGGCAGAAGACGAG | 343 |
| ATCTCTGGGCUCTAGTCUG | 60 | GACUGAAGACUGAGGACGAG | 344 |
| ATTACTGGACUCCAGCCUG | 61 | CAATCCCGUCTGAGGAUGGA | 345 |
| CTGTCAGGUGTGCAGCCUG | 62 | GGCUCTGGGCUGAGGACAAG | 346 |
| ATCTCCAACCUCCAGTUAG | 63 | AUGGGGGCACAGGAUGGAAA | 347 |
| ATCTCTGGGCUCCAGCCUG | 64 | AUGGGGCACAGGAUGGAAA | 348 |
| ATCTCTGGGCUCCAGTCUG | 65 | ACAGGGCCCAGGCTGGGA | 349 |
| ATCAGCAGGGCUCAGACUG | 66 | CTGAGCAGCCUGAGAUCAAG | 350 |
| CTTTTGGGUGCGCAGCCUG | 67 | ACAGGGCCCAGGCTGGGGA | 351 |
| ATCACTGGACUCCAGTCUG | 68 | AUGGGCCCCAGGCUGGAAA | 352 |
| ATCAGTGGGCUCCAGTCUG | 69 | GTGGGGCCCAGGCCAGGGA | 353 |
| ATCACUGGGGCCCAGGCUG | 70 | TGUGCAGCCCGAGAGGUGAA | 354 |
| ATCTCCAACCUCCAGTCUG | 71 | TCCGAGGATGAGGCTGATTATTAC | 355 |
| ACCTCTGGGCUCCAGGCUG | 72 | GCTGAGGACGAGGCTGATTATTAG | 356 |
| CTTTCGGGUGCGCAGCCUG | 73 | TTAGAGGATGAGGCTGATTATTAC | 357 |
| ATCTCTGGACUCCAGGCUG | 74 | TTTGAGGATGAGGCTGATTATTAC | 358 |
| ATCTCCGGGCUCCAGTCUG | 75 | CCTGAGGACGAGGCTGACTATTAC | 359 |
| ATCACTGGGCUCCAGGCUG | 76 | GCTGAGGATGAGGCTGATTATTAC | 360 |
| ATCTCCAACCUCCAGTTUG | 77 | CCTGAGGATGAGGCTGAGTATTAC | 361 |
| ATCTCGGGCCUCTAGCCUG | 78 | CCTGAGGACGAGGCTGATTATTAC | 362 |
| ATCATCAGGGCUCAGACUG | 79 | CCTGAGGATGAGGCTGACTATTAC | 363 |
| ATCTCCAGCCUCCAGTCUG | 80 | TCTGAGGATGAGGCTGACTATTAC | 364 |
| GTCTCTGGGCUCCAGGCUG | 81 | CCTGAGGACGAGGCTGAGTATTAC | 365 |
| ATCAGTGGGCUCCGGUCCG | 82 | TCTGAGGATGAGGCTGATTATTAC | 366 |
| CCAUCAGCAGGGTCCUGACCG | 83 | GCTGAGGACGAGGCTGATTATTAC | 367 |
| CCAUCAGTGGAGUCCAGGCAG | 84 | TCTGAAGATGAGGCTGACTATTAC | 368 |
| CCATCAGCAGGAUCGAGGCUG | 85 | ACTGAGGACGAGGCTGACTATTAC | 369 |
| TCATTTCTACAAUCCCGTCUG | 86 | CCTGAGGACTAGGCCGATTATTAC | 370 |
| CCATCACUGGGGCUCAGGCGG | 87 | GTTGAAGACAAGGCTGACTATTAC | 371 |
| TCATCTCTGGGCUCCAGCCUG | 88 | ACTGGGGACGAGGCCGATTATTAC | 372 |
| CCATCACUGGGATTCAGGTUG | 89 | GCTGGGGATGAGGCTGACTATTAC | 373 |
| CCATUAGCAGGGTCCUGACCA | 90 | GCCGGGGATGAGGCCGACTATTAC | 374 |
| CCAUCAGCGGGGCCCAGGTUG | 91 | GTTGAGGATGAGGCTGACTATTAC | 375 |
| CCAUCAGCAGGGUCGAAGCCG | 92 | GCTGAGGACAAGACTGATTATCAC | 376 |
| CCATCUCTGGCCUCCAGACCA | 93 | TCTGACGATGAGGCTGAGTATCAC | 377 |
| CCATCACGGGGGCCCAGGCAG | 94 | ACCGAAGACGAGGCTGACTATTAC | 378 |
| GCATCACCGGACUCCAGACUG | 95 | TCCGAGGTTGAGGCTAATTATCAC | 379 |
| CCATCAGUGGAGCCCAGGCUG | 96 | GTGGAGGATGAAGATGACTACTAC | 380 |
| GCATCTCUGAGCTGCAGCCUG | 97 | CCTGAGGACGAGGCTATGTATTAC | 381 |
| CCATCACUGGGGCTCAGGTUG | 98 | ACCAAGGACAAGCCTGCCTATTAC | 382 |
| CCATCTCUGGACTGAAGACUG | 99 | GTTGAACATGAAGCTGACTATTAC | 383 |
| CTATCAGUGGGGCCCAGGUGG | 100 | TCTGAGGATGGAGCTGACTATATC | 384 |
| CCAUCAAGAACAUCCAGGAAG | 101 | GAAGAAGATGAGAGTGACTACCAC | 385 |
| CCATCAGCAGAGCCCAAGCCG | 102 | GCCGGGGATGAGGCTGACTATTAC | 386 |
| CCATCTCUGGGCTCAAGUCCG | 103 | GCTATGGATGAGGCTGACTATTAC | 387 |
| GCACCACUGGGCTCTGGGCUG | 104 | GCAGATGATGAACTGATTATTAC | 388 |
| GCATCACUGGCCTCTGGCCUG | 105 | GTGGAGGATGAAGCTGACTACTAC | 389 |
| CCAUCAGCGGGACCCAGGCUA | 106 | ACTGAGGACGAGGCTGACTACTAC | 390 |
| CCATCAGUGGGGCCCAGGUGG | 107 | ACCAAAGGCGGGGCTGACTATTAC | 391 |
| CCTTCTCCAACCUCCAGTCUG | 108 | GCAGATGATGAATCTGATTATTAC | 392 |
| CUGATAATCAAUGGGCCCCAG | 109 | GCTGGGGACGAGGCTTTCCTCT | 393 |
| UGACCATTAGUGGGGCCCAG | 110 | GCAGAAGATGAGGCTGACTATTAC | 394 |
| CUGACCATTAGUGGGGCCCAG | 111 | GAAGAGGATGAGAGTGACTACCAC | 395 |
| GGCCATCAACAGGGCCCAG | 112 | GCGGAAGATGAGGCTGACTATTAC | 396 |
| CTGCACATTTCUGAGCAGCCUG | 113 | CCTGAGGACGAGGCCGATTATTAC | 397 |
| TUGATTATTAAUGGGGCACAG | 114 | GCAGAAGACGAGGCTGACTATTAC | 398 |
| TUGATTATTAAUGGGGGCACAG | 115 | ACAGGATGGAAACAAGGCTATTAC | 399 |
| CUCTTGGGTGUGCAGCCCGA | 116 | CCAGGCTGGAAACAAGGCTATTAC | 400 |
| ATCATCAGGGCTCAGACTGAG | 117 | CCAGGCCAGGGACGAGGCTATTAC | 401 |
| ATCTCTGGACTCCAGGCTGAG | 118 | CCAGGCTGGGGACCAGGCTATTAC | 402 |
| ATCACTGGGGCCCAGGCTGAG | 119 | CCTGAGATCAAGTCCGACTATTAC | 403 |
| ATCTCCAGCCTCCAGTCTGAG | 120 | CCAGGCTGGGACGAGGCTATTAC | 404 |
| ATCTCTGGGCTCCAGTCTGAG | 121 | CCGAGAGGTGAAGCTGAGTACTAC | 405 |
| ATCTCTGGGCTCCAGTCTGAA | 122 | TCCGAGGAUGAGGCTGATTATUAC | 406 |
| GTCTCTGGGCTCCAGGCTGAG | 123 | GCTGAGGACGAGGCUGATTATUAG | 407 |
| ATCTCCGGGCTCCAGTCTGAG | 124 | TTAGAGGAUGAGGCTGATTATUAC | 408 |
| ATCACTGGACTCCAGTCTGAG | 125 | TTTGAGGAUGAGGCTGATTATUAC | 409 |
| ATCTCTGGGCTCCAGCCTGAG | 126 | CCTGAGGACGAGGCUGACTATUAC | 410 |
| ATCAGCAGGGCTCAGACTGAG | 127 | GCTGAGGAUGAGGCTGATTATUAC | 411 |
| CTTTTGGGTGCGCAGCCTGAG | 128 | CCTGAGGAUGAGGCTGAGTATUAC | 412 |
| CTTTCGGGTGCGCAGCCTGAG | 129 | CCTGAGGACGAGGCUGATTATUAC | 413 |
| ATCTCTGGGCTCCAGGCTGAG | 130 | CCTGAGGAUGAGGCTGACTATUAC | 414 |
| ATCTCGGGCCTCTAGCCTGAG | 131 | TCTGAGGAUGAGGCTGACTATUAC | 415 |
| ATCTCCAACCTCCAGTTTGAG | 132 | CCTGAGGACGAGGCUGAGTATUAC | 416 |
| ATCTCTGGGCTCTAGTCTGAG | 133 | TCTGAGGAUGAGGCTGATTATUAC | 417 |
| ACCTCTGGGCTCCAGGCTGAG | 134 | GCTGAGGACGAGGCUGATTATUAC | 418 |
| ATCAGTGGGCTCCAGTCTGAG | 135 | TCTGAAGAUGAGGCTGACTATUAC | 419 |
| ATCAGTGGGCTCCGGTCCGAG | 136 | ACTGAGGACGAGGCUGACTATUAC | 420 |
| ATCTCCAACCTCCAGTTAGAG | 137 | CCTGAGGACUAGGCCGATTATUAC | 421 |
| ATTACTGGACTCCAGCCTGAG | 138 | GTTGAAGACAAGGCUGACTATUAC | 422 |
| ATCTCCAACCTCCAGTCTGAG | 139 | ACUGGGGACGAGGCCGATTATUAC | 423 |
| ATCACTGGGCTCCAGGCTGAG | 140 | GCTGGGGAUGAGGCTGACTATUAC | 424 |
| CTGTCAGGTGTGCAGCCTGAG | 141 | GCCGGGGAUGAGGCCGACTATUAC | 425 |
| CATCTCTGGGCTCAAGTCCGAG | 142 | GTTGAGGAUGAGGCTGACTATUAC | 426 |
| CATCTCTGGCCTCCAGACCAAG | 143 | GCTGAGGACAAGACUGATTAUCAC | 427 |
| CATTTCTACAATCCCGTCTGAG | 144 | TCTGACGAUGAGGCTGAGTAUCAC | 428 |
| CATCACTGGCCTCTGGCCTGAG | 145 | ACCGAAGACGAGGCUGACTATUAC | 429 |
| CTTCTCCAACCTCCAGTCTGAC | 146 | TCCGAGGTUGAGGCTAATTAUCAC | 430 |
| CATCACTGGGGCTCAGGCGGAA | 147 | GTGGAGGAUGAAGATGACTACUAC | 431 |
| CATCAAGAACATCCAGGAAGAG | 148 | CCTGAGGACGAGGCUATGTATUAC | 432 |
| CATCACTGGGGCTCAGGTTGAA | 149 | ACCAAGGACAAGCCUGCCTATUAC | 433 |
| CATTAGCAGGGTCCTGACCAAA | 150 | GTTGAACAUGAAGCTGACTATUAC | 434 |
| CATCAGCAGGGTCCTGACCGAA | 151 | TCTGAGGAUGGAGCTGACTATAUC | 435 |
| CATCAGCAGAGCCCAAGCCGGG | 152 | GAAGAAGAUGAGAGTGACUACCAC | 436 |
| CATCTCTGGGCTCCAGCCTGAG | 153 | GCCGGGGAUGAGGCTGACTATUAC | 437 |
| CATCACGGGGGCCCAGGCAGAT | 154 | GCTATGGAUGAGGCTGACTATUAC | 438 |
| CATCAGCAGGGTCGAAGCCGGG | 155 | GCAGATGAUGAACTGATTATUAC | 439 |
| CATCAGTGGAGTCCAGGCAGAA | 156 | GTGGAGGAUGAAGCTGACTACUAC | 440 |
| CATCACTGGGATTCAGGTTGAA | 157 | ACTGAGGACGAGGCUGACTACUAC | 441 |
| CATCAGCGGGGCCCAGGTTGAG | 158 | ACCAAAGGCGGGGCUGACTATUAC | 442 |
| TATCAGTGGGGCCCAGGTGGAG | 159 | GCAGATGAUGAATCTGATTATUAC | 443 |
| CATCAGTGGGGCCCAGGTGGAG | 160 | GCTGGGGACGAGGCUTTCCTCU | 444 |
| CATCACCGGACTCCAGACTGGG | 161 | GCAGAAGAUGAGGCTGACTATUAC | 445 |
| CATCTCTGGACTGAAGACTGAG | 162 | GAAGAGGAUGAGAGTGACUACCAC | 446 |
| CATCAGTGGAGCCCAGGCTGGG | 163 | GCGGAAGAUGAGGCTGACTATUAC | 447 |
| CATCTCTGAGCTGCAGCCTGAG | 164 | CCUGAGGACGAGGCCGATTATUAC | 448 |
| CATCAGCAGGATCGAGGCTGGG | 165 | GCAGAAGACGAGGCUGACTATUAC | 449 |
| CACCACTGGGCTCTGGGCTGAG | 166 | ACAGGAUGGAAACAAGGCTATUAC | 450 |
| CATCAGCGGGACCCAGGCTATG | 167 | CCAGGCUGGAAACAAGGCTATUAC | 451 |
| CATCAAGAACATCCAGGAAGAA | 168 | CCAGGCCAGGGACGAGGCUATUAC | 452 |
| GGCCATCAACAGGGCCCAGGC | 169 | CCAGGCUGGGGACCAGGCTATUAC | 453 |
| GACCATTAGTGGGGCCCAGGC | 170 | CCTGAGATCAAGUCCGACTATUAC | 454 |
| GATTATTAATGGGGGCACAGGA | 171 | CCAGGCUGGGACGAGGCTATUAC | 455 |
| GCACATTTCTGAGCAGCCTGAG | 172 | CCGAGAGGUGAAGCTGAGTACUAC | 456 |
| GATTATTAATGGGGCACAGGA | 173 | GCTGAGGATGAGGCTGATTATTACT | 457 |
| GATAATCAATGGGCCCCAGGC | 174 | CCTGAGGACGAGGCTGAGTATTACT | 458 |
| CTTGGGTGTGCAGCCCGAGA | 175 | TCTGAGGATGAGGCTGACTATTACT | 459 |
| ATCATCAGGGCUCAGACUGAG | 176 | TCCGAGGATGAGGCTGATTATTACT | 460 |
| ATCTCTGGACUCCAGGCUGAG | 177 | CCTGAGGACGAGGCTGACTATTACT | 461 |
| ATCACUGGGGCCCAGGCUGAG | 178 | ACTGAGGACGAGGCTGACTATTACT | 462 |
| ATCTCCAGCCUCCAGTCUGAG | 179 | TCTGAAGATGAGGCTGACTATTACT | 463 |
| ATCTCTGGGCUCCAGTCUGAG | 180 | TTAGAGGATGAGGCTGATTATTACT | 464 |
| ATCTCTGGGCUCCAGTCUGAA | 181 | GCTGAGGACGAGGCTGATTATTAGT | 465 |
| GTCTCTGGGCUCCAGGCUGAG | 182 | TCTGAGGATGAGGCTGATTATTACT | 466 |
| ATCTCCGGGCUCCAGTCUGAG | 183 | CCTGAGGATGAGGCTGACTATTACT | 467 |
| ATCACTGGACUCCAGTCUGAG | 184 | GCTGAGGACGAGGCTGATTATTACT | 468 |
| ATCTCTGGGCUCCAGCCUGAG | 185 | CCTGAGGATGAGGCTGAGTATTACT | 469 |
| ATCAGCAGGGCUCAGACUGAG | 186 | CCTGAGGACGAGGCTGATTATTACT | 470 |
| CTTTTGGGUGCGCAGCCUGAG | 187 | TTTGAGGATGAGGCTGATTATTACT | 471 |
| CTTTCGGGUGCGCAGCCUGAG | 188 | GCCTGAGGACGAGGCTATGTATTACT | 472 |
| ATCTCTGGGCUCCAGGCUGAG | 189 | GGCAGAAGACGAGGCTGACTATTACT | 473 |
| ATCTCGGGCCUCTAGCCUGAG | 190 | GTCTGACGATGAGGCTGAGTATCACT | 474 |
| ATCTCCAACCUCCAGTTUGAG | 191 | GGCAGATGATGAATCTGATTATTACT | 475 |
| ATCTCTGGGCUCTAGTCUGAG | 192 | GTCCGAGGTTGAGGCTAATTATCACT | 476 |
| ACCTCTGGGCUCCAGGCUGAG | 193 | GGTTGAACATGAAGCTGACTATTACC | 477 |
| ATCAGTGGGCUCCAGTCUGAG | 194 | GGCTATGGATGAGGCTGACTATTACT | 478 |
| ATCAGTGGGCUCCGGUCCGAG | 195 | GGCGGAAGATGAGGCTGACTATTACT | 479 |
| ATCTCCAACCUCCAGTUAGAG | 196 | GGAAGAGGATGAGAGTGACTACCACT | 480 |
| ATTACTGGACUCCAGCCUGAG | 197 | GGTTGAGGATGAGGCTGACTATTACT | 481 |
| ATCTCCAACCUCCAGTCUGAG | 198 | GACCAAAGGCGGGGCTGACTATTACT | 482 |
| ATCACTGGGCUCCAGGCUGAG | 199 | GACCAAGGACAAGCCTGCCTATTACT | 483 |
| CTGTCAGGUGTGCAGCCUGAG | 200 | GGCTGGGGATGAGGCTGACTATTACT | 484 |
| CATCTCUGGGCTCAAGUCCGAG | 201 | GACTGGGGACGAGGCCGATTATTACT | 485 |
| CAUCTCTGGCCUCCAGACCAAG | 202 | GGTTGAAGACAAGGCTGACTATTACT | 486 |
| CATTTCTACAAUCCCGTCUGAG | 203 | GACCGAAGACGAGGCTGACTATTACT | 487 |
| CATCACTGGCCUCTGGCCUGAG | 204 | GGTGGAGGATGAAGATGACTACTACT | 488 |
| CTTCTCCAACCUCCAGTCUGAC | 205 | GACTGAGGACGAGGCTGACTACTACT | 489 |
| CATCACUGGGGCUCAGGCGGAA | 206 | GTCTGAGGATGGAGCTGACTATATCT | 490 |
| CAUCAAGAACAUCCAGGAAGAG | 207 | AGCCGGGGATGAGGCCGACTATTACT | 491 |
| CATCACUGGGGCTCAGGTUGAA | 208 | GGCAGATGATGAACTGATTATTACT | 492 |
| CATUAGCAGGGTCCUGACCAAA | 209 | GGTGGAGGATGAAGCTGACTACTACT | 493 |
| CATCAGCAGGGUCCUGACCGAA | 210 | GGAAGAAGATGAGAGTGACTACCACT | 494 |
| CATCAGCAGAGCCCAAGCCGGG | 211 | GGCTGAGGACAAGACTGATTATCACT | 495 |
| CATCTCTGGGCUCCAGCCUGAG | 212 | GCCTGAGGACTAGGCCGATTATTACT | 496 |
| CATCACGGGGGCCCAGGCAGAT | 213 | GGCAGAAGATGAGGCTGACTATTACT | 497 |
| CAUCAGCAGGGUCGAAGCCGGG | 214 | GCCTGAGGACGAGGCCGATTATTACT | 498 |
| CAUCAGTGGAGUCCAGGCAGAA | 215 | AGCCGGGGATGAGGCTGACTATTACT | 499 |
| CATCACUGGGATTCAGGTUGAA | 216 | GGCTGGGGACGAGGCTTTCCTCT | 500 |
| CAUCAGCGGGGCCCAGGTUGAG | 217 | ACAGGATGGAAACAAGGCTATTACT | 501 |
| TATCAGUGGGGCCCAGGUGGAG | 218 | CCAGGCTGGGACGAGGCTATTACT | 502 |
| CATCAGUGGGGCCCAGGUGGAG | 219 | CCAGGCCAGGGACGAGGCTATTACT | 503 |
| CATCACCGGACUCCAGACUGGG | 220 | CCAGGCTGGGGACCAGGCTATTACT | 504 |
| CATCTCUGGACTGAAGACUGAG | 221 | CCAGGCTGGAAACAAGGCTATTACT | 505 |
| CATCAGUGGAGCCCAGGCUGGG | 222 | CCTGAGATCAAGTCCGACTATTACT | 506 |
| CATCTCTGAGCUGCAGCCUGAG | 223 | CCGAGAGGTGAAGCTGAGTACTACT | 507 |
| CATCAGCAGGAUCGAGGCUGGG | 224 | GCTGAGGAUGAGGCTGATTATUACT | 508 |
| CACCACTGGGCUCTGGGCUGAG | 225 | CCTGAGGACGAGGCUGAGTATUACT | 509 |
| CAUCAGCGGGACCCAGGCTAUG | 226 | TCTGAGGAUGAGGCTGACTATUACT | 510 |
| CAUCAAGAACAUCCAGGAAGAA | 227 | TCCGAGGAUGAGGCTGATTATUACT | 511 |
| GGCCATCAACAGGGCCCAGGC | 228 | CCTGAGGACGAGGCUGACTATUACT | 512 |
| GACCAUTAGUGGGGCCCAGGC | 229 | ACTGAGGACGAGGCUGACTATUACT | 513 |
| GAUTATTAAUGGGGGCACAGGA | 230 | TCTGAAGAUGAGGCTGACTATUACT | 514 |
| GCACATTTCUGAGCAGCCUGAG | 231 | TTAGAGGAUGAGGCTGATTATUACT | 515 |
| GAUTATTAAUGGGGCACAGGA | 232 | GCTGAGGACGAGGCUGATTATUAGT | 516 |
| GAUAATCAAUGGGCCCCAGGC | 233 | TCTGAGGAUGAGGCTGATTATUACT | 517 |
| CUTGGGTGUGCAGCCCGAGA | 234 | CCTGAGGAUGAGGCTGACTATUACT | 518 |
| GACTCCAGTCTGAGGATGAG | 235 | GCTGAGGACGAGGCUGATTATUACT | 519 |
| GGCTCCAGTCTGAGGATGAG | 236 | CCTGAGGAUGAGGCTGAGTATUACT | 520 |
| ACCTCCAGTTAGAGGATGAG | 237 | CCTGAGGACGAGGCUGATTATUACT | 521 |
| ACCTCCAGTTTGAGGATGAG | 238 | TTTGAGGAUGAGGCTGATTATUACT | 522 |
| GGGCCCAGGCTGAGGATGAG | 239 | GCCTGAGGACGAGGCUATGTATUACT | 523 |
| GCCTCCAGTCTGAGGATGAG | 240 | GGCAGAAGACGAGGCUGACTATUACT | 524 |
| GGCTCCGGTCCGAGGATGAG | 241 | GTCTGACGAUGAGGCTGAGTAUCACT | 525 |
| GGCTCTAGTCTGAGGATGAG | 242 | GGCAGATGAUGAATCTGATTATUACT | 526 |
| GGCTCCAGTCTGAAGATGAG | 243 | GTCCGAGGTUGAGGCTAATTAUCACT | 527 |
| GTGTGCAGCCTGAGGACGAG | 244 | GGTTGAACAUGAAGCTGACTATUACC | 528 |
| GCCTCTAGCCTGAGGACGAG | 245 | GGCTATGGAUGAGGCTGACTATUACT | 529 |
| GTGCGCAGCCTGAGGATGAG | 246 | GGCGGAAGAUGAGGCTGACTATUACT | 530 |
| GGCTCCAGGCTGAGGACGAG | 247 | GGAAGAGGAUGAGAGTGACUACCACT | 531 |
| GACTCCAGCCTGAGGACGAG | 248 | GGTTGAGGAUGAGGCTGACTATUACT | 532 |
| ACCTCCAGTCTGAGGATGAG | 249 | GACCAAAGGCGGGGCUGACTATUACT | 533 |
| GGCTCCAGGCTGAGGATGAG | 250 | GACCAAGGACAAGCCUGCCTATUACT | 534 |
| GACTCCAGGCTGAGGACGAG | 251 | GGCTGGGGAUGAGGCTGACTATUACT | 535 |
| GGGCTCAGACTGAGGACGAG | 252 | GACUGGGGACGAGGCCGATTATUACT | 536 |
| GGCTCCAGCCTGAGGATGAG | 253 | GGTTGAAGACAAGGCUGACTATUACT | 537 |
| GGGTCCTGACCGAAGACGAG | 254 | GACCGAAGACGAGGCUGACTATUACT | 538 |
| GCCTCTGGCCTGAGGACGAG | 255 | GGTGGAGGAUGAAGATGACTACUACT | 539 |
| GCCTCTGGCCTGAGGACTAG | 256 | GACTGAGGACGAGGCUGACTACUACT | 540 |
| GGATCGAGGCTGGGGATGAG | 257 | GTCTGAGGAUGGAGCTGACTATAUCT | 541 |
| GGGCCCAGGTGGAGGATGAA | 258 | AGCCGGGGAUGAGGCCGACTATUACT | 542 |
| GGCTCAAGTCCGAGGTTGAG | 259 | GGCAGATGAUGAACTGATTATUACT | 543 |
| GCCTCCAGACCAAGGACAAG | 260 | GGTGGAGGAUGAAGCTGACTACUACT | 544 |
| GGCTCCAGCCTGAGGACGAG | 261 | GGAAGAAGAUGAGAGTGACUACCACT | 545 |
| GGGCCCAGGTTGAGGATGAG | 262 | GGCUGAGGACAAGACTGATTAUCACT | 546 |
| GGGTCCTGACCAAAGGCGGG | 263 | GCCTGAGGACUAGGCCGATTATUACT | 547 |
| ACCTCCAGTCTGACGATGAG | 264 | GGCAGAAGAUGAGGCTGACTATUACT | 548 |
| AGCTGCAGCCTGAGGACGAG | 265 | GCCUGAGGACGAGGCCGATTATUACT | 1447 |
| GGACCCAGGCTATGGATGAG | 266 | AGCCGGGGAUGAGGCTGACTATUACT | 1448 |
| GACTCCAGACTGGGGACGAG | 267 | GGCTGGGGACGAGGCUTTCCTCU | 1449 |
| ACATCCAGGAAGAAGATGAG | 268 | ACAGGAUGGAAACAAGGCTATUACT | 1450 |
| GGATTCAGGTTGAAGACAAG | 269 | CCAGGCUGGGACGAGGCTATUACT | 1451 |
| GGGTCGAAGCCGGGGATGAG | 270 | CCAGGCCAGGGACGAGGCUATUACT | 1452 |
| GAGTCCAGGCAGAAGATGAG | 271 | CCAGGCUGGGGACCAGGCTATUACT | 1453 |
| ACATCCAGGAAGAGGATGAG | 272 | CCAGGCUGGAAACAAGGCTATUACT | 1454 |
| GGGCTCAGGTTGAACATGAA | 273 | CCTGAGATCAAGUCCGACTATUACT | 1455 |
| GGGCTCAGGCGGAAGATGAG | 274 | CCGAGAGGUGAAGCTGAGTACUACT | 1456 |
| GACGGAGACCAAGGAUGTUGGA | 275 | GACGGAGACCAAGGATGTTGGA | 1457 |
| GGTGGAGGCUGAGGATGTUGGA | 276 | GGTGGAGGCTGAGGATGTTGGA | 1458 |
| GGTAGAGGCUGAGGACGTUGGG | 277 | GGTAGAGGCTGAGGACGTTGGG | 1459 |
| GGTGGAGGCUGAGGATTTUGGA | 278 | GGTGGAGGCTGAGGATTTTGGA | 1460 |
| GGTGGAGGCUGAGGATGTUGGG | 279 | GGTGGAGGCTGAGGATGTTGGG | 1461 |
| GACGGAGACUAAGGATGTUGGA | 280 | GACGGAGACTAAGGATGTTGGA | 1462 |
| AGTGGAGGCUGAGGATGTUGGG | 281 | AGTGGAGGCTGAGGATGTTGGG | 1463 |
| GGTGGAAGCUGAGGATGUCGGG | 282 | GGTGGAAGCTGAGGATGTCGGG | 1464 |
| GATGGATGCUGAGGATGTUGGG | 283 | GATGGATGCTGAGGATGTTGGG | 1465 |
| GGTGGAGGCUGAGGATATUCGA | 284 | GGTGGAGGCTGAGGATATTCGA | 1466 |

TABLE 2
IgL lambda J gene

| | SEQ ID |
|---|---|
| Sequence | NO |
| GACGGTCAGCTCCGTCCC | 549 |
| GACGGTCAGCTCGGTCCC | 550 |
| GACGGTGACCTTGGTCCC | 551 |
| GACGGTCAGCTGGGTGCC | 552 |
| AATGATCAGCTGGGTTCC | 553 |
| GACGGTCACCTTGGTGCC | 554 |
| GACGGTCAGCTTGGTCCC | 555 |
| GGCGGTCAGCTGGGTGCC | 556 |
| GACGGUCAGCTCCGUCCC | 557 |
| GACGGUCAGCTCGGUCCC | 558 |
| GACGGUGACCTTGGUCCC | 559 |
| GACGGUCAGCTGGGUGCC | 560 |
| AATGATCAGCUGGGTUCC | 561 |
| GACGGUCACCTTGGUGCC | 562 |
| GACGGUCAGCTTGGUCCC | 563 |
| GGCGGUCAGCTGGGUGCC | 564 |
| GGACGGTCAGCTGGGTGC | 565 |
| GGGCGGTCAGCTGGGTGC | 566 |
| AAATGATCAGCTGGGTTC | 567 |
| GGACGGTGACCTTGGTCC | 568 |
| GGACGGTCACCTTGGTGC | 569 |
| GGACGGTCAGCTTGGTCC | 570 |
| GGACGGTCAGCTCCGTCC | 571 |
| GGACGGTCAGCTCGGTCC | 572 |
| GGACGGUCAGCTGGGUGC | 573 |
| GGGCGGUCAGCTGGGUGC | 574 |
| AAATGAUCAGCTGGGTUC | 575 |
| GGACGGUGACCTTGGUCC | 576 |
| GGACGGUCACCTTGGUGC | 577 |
| GGACGGUCAGCTTGGUCC | 578 |
| GGACGGUCAGCTCCGUCC | 579 |
| GGACGGUCAGCTCGGUCC | 580 |
| CGAGGACGGTCAGCTGGGT | 581 |
| CGAGGGCGGTCAGCTGGGT | 582 |
| CTAGGACGGTGACCTTGGT | 583 |
| CGAGGACGGTCACCTTGGT | 584 |
| CTAGGACGGTCAGCTCCGT | 585 |
| CTAGGACGGTCAGCTTGGT | 586 |
| CTAAAATGATCAGCTGGGT | 587 |
| CTAGGACGGTCAGCTCGGT | 588 |
| CGAGGACGGUCAGCUGGGT | 589 |
| CGAGGGCGGUCAGCUGGGT | 590 |
| CTAGGACGGUGACCTUGGT | 591 |
| CGAGGACGGUCACCTUGGT | 592 |
| CTAGGACGGUCAGCUCCGT | 593 |
| CTAGGACGGUCAGCTUGGT | 594 |
| CTAAAAUGATCAGCUGGGT | 595 |
| CTAGGACGGUCAGCUCGGT | 596 |

TABLE 3
IgL kappa V gene

| | SEQ |
|---|---|
| | ID |
| Sequence | NO |
| CTAGAGCCTGAAGATTTTGCAGTGTATTAC | 597 |
| CTGCAGCCTGAAGATTTTGCAACTTATTAC | 598 |
| CTGCAACCTGAAGATGTTATAACTTATTGC | 599 |
| CTGCAGCCTGAAGATTTTGCAACTTACTAT | 600 |
| CTGCAGCCTGAAGATTTTGCAGTTTATTAC | 601 |
| CTGCAGTCTGAAGATTTTGCAACTTATTAC | 602 |
| CTGGAGCCTGAAGATTTGCACTTCATCAC | 603 |
| CTGCAACCTGAAGATTTTGCAACTTATTAC | 604 |
| CTGGAGCCTGAAGATTTTGCAGTTTATTAC | 605 |
| CTGGAGCCTGAAGATTTTGCAGTGTATTAC | 606 |
| CTAGAGCCTGAAGATTTTGCAGTTTATTAC | 607 |
| CTGGAGCCTGAAGATTTTGCAGTCTATTAC | 608 |
| CTGGAAGCTGAAGATGCTGCAACATATTAC | 609 |
| CTGCAGGCTGAAGATGTGGCAGTTTATTAC | 610 |
| CTGCAGCCTGATGATTTTGCAACTTATTAC | 611 |
| CTGAAGCCTGAAGATTTTGCAGCTTATTAC | 612 |
| CTCCAGTCTGAAGTTGCTGCAACTTCTTAT | 613 |
| CTGCAGCCTAAAGATGTTGCAACTTATTAC | 614 |
| CTGGAAGCTGAAGATGCTGCAACGTATTAC | 615 |
| CTGCAGTCTGAAGATTTTGCAGTTTATTAC | 616 |
| CTAGACCCTGAAGATGTCACAATTTTATTAC | 617 |
| CTGCAGCCTGAAGATGTTGCAACTTATTAC | 618 |
| CTGCAGCCTGAAGATATTGCAACATATTAC | 619 |
| CTGCAGCCTAAAGATGTTGCAAGTTATTAC | 620 |
| CTGGAGCATGAAGATTTTGCACTTTAACAC | 621 |
| CTGGAAGCTGAAGATGCTGCAGCGTATTAC | 622 |
| ATAGAATCTGAGGATGCTGCATATTACTTC | 623 |
| GTGGAAGCTAATGATACTGCAAATTATTAC | 624 |
| CTGCAACCTGAAGATTTTGCAACTTACTAC | 625 |
| CTGCAACCTGAAGATGTTATAACTTATTAC | 626 |
| GCCTTCCCACACAGGTTCTCCC | 627 |
| AGAGCCTGAAGATTTTGCAGTGTATTACT | 628 |
| AGAGCCTGAAGATTTTGCAGTTTATTACT | 629 |
| AGAATCTGAGGATGCTGCATATTACTTCT | 630 |
| GGAGCATGAAGATTTTGCACTTTAACACT | 631 |
| GGAAGCTAATGATACTGCAAATTATTACT | 632 |
| GGAGCCTGAAGATTTTGCAGTTTATTACT | 633 |
| CCAGTCTGAAGTTGCTGCAACTTCTTATT | 634 |
| GCAGCCTGAAGATGTTGCAACTTATTACG | 635 |
| GCAGGCTGAAGATGTGGCAGTTTATTACT | 636 |
| GCAGCCTGATGATTTTGCAACTTATTACT | 637 |
| GCAACCTGAAGATTTTGCAACTTATTACT | 638 |
| GGAAGCTGAAGATGCTGCAGCGTATTACT | 639 |
| GCAACCTGAAGATTTTGCAACTTACTACT | 640 |
| GCAGTCTGAAGATTTTGCAACTTATTACT | 641 |
| GAAGCCTGAAGATTTTGCAGCTTATTACT | 642 |
| GCAGCCTGAAGATGTTGCAACTTATTACT | 643 |
| AGACCCTGAAGATGTCACAATTTTATTACC | 644 |
| GGAAGCTGAAGATGCTGCAACATATTACT | 645 |
| GCAGCCTAAAGATGTTGCAACTTATTACT | 646 |
| GGAGCCTGAAGATTTTGCAGTCTATTACT | 647 |
| GGAAGCTGAAGATGCTGCAACGTATTACT | 648 |
| GCAGCCTGAAGATATTGCAACATATTACT | 649 |
| GGAGCCTGAAGATTTGCACTTCATCACT | 650 |
| GCAGCCTAAAGATGTTGCAAGTTATTACT | 651 |
| GCAGCCTGAAGATTTTGCAGTTTATTACT | 652 |
| GCAACCTGAAGATGTTATAACTTATTGC | 653 |
| GCAGCCTGAAGATTTTGCAACTTATTACT | 654 |
| GCAACCTGAAGATGTTATAACTTATTACT | 655 |
| GGAGCCTGAAGATTTTGCAGTGTATTACT | 656 |
| GCAGCCTGAAGATTTTGCAACTTACTATT | 657 |
| GCAGTCTGAAGATTTTGCAGTTTATTACT | 658 |
| CTGCCTTCCCACACAGGTTCTCC | 659 |
| CTGGAGCCTGAAGATTTGCACTTCAT | 660 |
| GTGGAAGCTAATGATACTGCAAATTAT | 661 |
| CTGCAGCCTGAAGATTTTGCAGTTTAT | 662 |
| CTGGAGCCTGAAGATTTTGCAGTGTAT | 663 |
| CTGGAGCCTGAAGATTTTGCAGTTTAT | 664 |
| CTGGAAGCTGAAGATGCTGCAACATAT | 665 |
| CTGCAGCCTGAAGATTTTGCAACTTAC | 666 |
| CTAGAGCCTGAAGATTTTGCAGTTTAT | 667 |
| CTGCAGTCTGAAGATTTTGCAACTTAT | 668 |
| CTGCAGTCTGAAGATTTTGCAGTTTAT | 669 |
| CTAGACCCTGAAGATGTCACAATTTTAT | 670 |
| CTGGAAGCTGAAGATGCTGCAGCGTAT | 671 |
| CTGGAGCCTGAAGATTTTGCAGTCTAT | 672 |
| CTGGAGCATGAAGATTTTGCACTTTAA | 673 |
| CTGCAGCCTGATGATTTTGCAACTTAT | 674 |
| CTGCAGCCTAAAGATGTTGCAACTTAT | 675 |
| CTGCAGGCTGAAGATGTGGCAGTTTAT | 676 |
| CTGCAGCCTGAAGATGTTGCAACTTAT | 677 |
| CTGCAACCTGAAGATTTTGCAACTTAC | 678 |
| ATAGAATCTGAGGATGCTGCATATTAC | 679 |
| CTGCAACCTGAAGATTTTGCAACTTAT | 680 |
| CTGCAGCCTAAAGATGTTGCAAGTTAT | 681 |
| CTGCAGCCTGAAGATTTTGCAACTTAT | 682 |
| CTAGAGCCTGAAGATTTTGCAGTGTAT | 683 |
| CTGCAACCTGAAGATGTTATAACTTAT | 684 |
| CTGAAGCCTGAAGATTTTGCAGCTTAT | 685 |
| CTGGAAGCTGAAGATGCTGCAACGTAT | 686 |
| CTGCAGCCTGAAGATATTGCAACATAT | 687 |
| CTCCAGTCTGAAGTTGCTGCAACTTCT | 688 |
| CAGTTTTCTGCCTTCCCACACAGGTT | 689 |
| CCTGCAGCCTGAAGATTTTGCA | 690 |
| CCTGCAGGCTGAAGATGTGGCA | 691 |
| CCTGCAGCCTGAAGATGTTGCA | 692 |
| CCTGCAGTCTGAAGATTTTGCA | 693 |
| ACTGGAGCCTGAAGATTTTGCA | 694 |
| TGTGGAAGCTAATGATACTGCA | 695 |
| CCTGCAGCCTGATGATTTTGCA | 696 |
| CCTGGAAGCTGAAGATGCTGCA | 697 |
| CCTAGAGCCTGAAGATTTTGCA | 698 |
| CCTGCAGCCTGAAGATATTGCA | 699 |
| TCTGCAACCTGAAGATTTTGCA | 700 |
| GCTGGAGCATGAAGATTTTGCA | 701 |
| CCTGCAGCCTAAAGATGTTGCA | 702 |
| CCTCCAGTCTGAAGTTGCTGCA | 703 |
| CCTGCAACCTGAAGATGTTATA | 704 |
| GCTGGAGCCTGAAGATTTGCA | 705 |
| CCTAGACCCTGAAGATGTCACA | 706 |
| CATAGAATCTGAGGATGCTGCA | 707 |
| CCTGAAGCCTGAAGATTTTGCA | 708 |
| CAGTTTTCTGCCTTCCCACACAGGT | 709 |
| GGGTGGAGGCTGAGGATATTCG | 710 |
| GGACGGAGACCAAGGATGTTGG | 711 |
| GGGTGGAGGCTGAGGATGTTGG | 712 |
| GGACGGAGACTAAGGATGTTGG | 713 |
| GGATGGATGCTGAGGATGTTGG | 714 |
| AAGTGGAGGCTGAGGATGTTGG | 715 |
| GAGTGGAGGCTGAGGATGTTGG | 716 |
| GGGTGGAGGCTGAGGATTTTGG | 717 |
| GGGTGGAAGCTGAGGATGTCGG | 718 |
| GGGTAGAGGCTGAGGACGTTGG | 719 |
| ACATAGAATCTGAGGATGCTGC | 720 |
| CTGTGGAAGCTAATGATACTGC | 721 |
| ACCTGCAGCCTGAAGATTTTGC | 722 |
| GCCTGCAGCCTGAAGATTTTGC | 723 |
| GTCTGCAACCTGAAGATTTTGC | 724 |
| GCCTGCAACCTGAAGATGTTAT | 725 |
| GCCTGCAGGCTGAAGATGTGGC | 726 |
| TCCTGCAGTCTGAAGATTTTGC | 727 |
| TCCTCCAGTCTGAAGTTGCTGC | 728 |
| GCCTGGAAGCTGAAGATGCTGC | 729 |
| GCCTAGAGCCTGAAGATTTTGC | 730 |
| GCCTGCAGCCTGATGATTTTGC | 731 |
| GACTGGAGCCTGAAGATTITGC | 732 |
| GCCTGAAGCCTGAAGATTTTGC | 733 |
| TCCTGCAGCCTAAAGATGTTGC | 734 |
| GCCTGCAGTCTGAAGATTTTGC | 735 |
| GGCTGGAGCATGAAGATTTTGC | 736 |
| GCCTAGACCCTGAAGATGTCAC | 737 |
| GCCTGCAGCCTGAAGATGTTGC | 738 |
| GCCTGCAGCCTGAAGATATTGC | 739 |
| GGCTGGAGCCTGAAGATTTGC | 740 |
| CAATCAGTTTTCTGCCTTCCCACACAGG | 741 |
| CGGGTGGAGGCTGAGGATTTTG | 742 |
| AGGGTGGAGGCTGAGGATGTTG | 743 |
| AGAGTGGAGGCTGAGGATGTTG | 744 |
| TGGGTGGAGGCTGAGGATGTTG | 745 |
| AGGATGGATGCTGAGGATGTTG | 746 |
| CGGGTGGAGGCTGAGGATGTTG | 747 |
| AGGACGGAGACTAAGGATGTTG | 748 |
| AAAGTGGAGGCTGAGGATGTTG | 749 |
| AGGGTGGAGGCTGAGGATATTC | 750 |
| AGGGTGGAAGCTGAGGATGTCG | 751 |
| AGGGTAGAGGCTGAGGACGTTG | 752 |
| AGGACGGAGACCAAGGATGTTG | 753 |
| CTAGAGCCTGAAGAUTTTGCAGTGTATUAC | 754 |
| CTGCAGCCTGAAGAUTTTGCAACTTATUAC | 755 |
| CTGCAACCTGAAGAUGTTATAACTTATUGC | 756 |
| CTGCAGCCTGAAGAUTTTGCAACTTACUAT | 757 |
| CTGCAGCCTGAAGAUTTTGCAGTTTATUAC | 758 |
| CTGCAGTCTGAAGAUTTTGCAACTTATUAC | 759 |
| CTGGAGCCUGAAGATTTGCACTTCAUCAC | 760 |
| CTGCAACCTGAAGAUTTTGCAACTTATUAC | 761 |
| CTGGAGCCTGAAGAUTTTGCAGTTTATUAC | 762 |
| CTGGAGCCTGAAGAUTTTGCAGTGTATUAC | 763 |
| CTAGAGCCTGAAGAUTTTGCAGTTTATUAC | 764 |
| CTGGAGCCTGAAGAUTTTGCAGTCTATUAC | 765 |
| CTGGAAGCTGAAGAUGCTGCAACATATUAC | 766 |
| CTGCAGGCTGAAGAUGTGGCAGTTTATUAC | 767 |
| CTGCAGCCTGAUGATTTTGCAACTTATUAC | 768 |
| CTGAAGCCTGAAGAUTTTGCAGCTTATUAC | 769 |
| CTCCAGTCTGAAGUTGCTGCAACTTCTUAT | 770 |
| CTGCAGCCTAAAGAUGTTGCAACTTATUAC | 771 |
| CTGGAAGCTGAAGAUGCTGCAACGTATUAC | 772 |
| CTGCAGTCTGAAGAUTTTGCAGTTTATUAC | 773 |
| CTAGACCCTGAAGAUGTCACAATTTTATUAC | 774 |
| CTGCAGCCTGAAGAUGTTGCAACTTATUAC | 775 |
| CTGCAGCCTGAAGAUATTGCAACATATUAC | 776 |
| CTGCAGCCTAAAGAUGTTGCAAGTTATUAC | 777 |
| CTGGAGCAUGAAGATTTTGCACTTUAACAC | 778 |
| CTGGAAGCTGAAGAUGCTGCAGCGTATUAC | 779 |
| ATAGAATCTGAGGAUGCTGCATATTACTUC | 780 |
| GTGGAAGCTAAUGATACTGCAAATTATUAC | 781 |
| CTGCAACCTGAAGAUTTTGCAACTTACUAC | 782 |
| CTGCAACCTGAAGAUGTTATAACTTATUAC | 783 |
| GCCTUCCCACACAGGTTCUCCC | 784 |
| AGAGCCTGAAGAUTTTGCAGTGTATUACT | 785 |
| AGAGCCTGAAGAUTTTGCAGTTTATUACT | 786 |
| AGAATCTGAGGAUGCTGCATATTACTUCT | 787 |
| GGAGCATGAAGAUTTTGCACTTUAACACT | 788 |
| GGAAGCTAATGAUACTGCAAATTATUACT | 789 |
| GGAGCCTGAAGAUTTTGCAGTTTATUACT | 790 |
| CCAGTCTGAAGTUGCTGCAACTTCTTAUT | 791 |
| GCAGCCTGAAGAUGTTGCAACTTATUACG | 792 |
| GCAGGCTGAAGAUGTGGCAGTTTATUACT | 793 |
| GCAGCCTGAUGATTTTGCAACTTATUACT | 794 |
| GCAACCTGAAGAUTTTGCAACTTATUACT | 795 |
| GGAAGCTGAAGAUGCTGCAGCGTATUACT | 796 |
| GCAACCTGAAGAUTTTGCAACTTACUACT | 797 |
| GCAGTCTGAAGAUTTTGCAACTTATUACT | 798 |
| GAAGCCTGAAGAUTTTGCAGCTTATUACT | 799 |
| GCAGCCTGAAGAUGTTGCAACTTATUACT | 800 |
| AGACCCTGAAGAUGTCACAATTTTATUACC | 801 |
| GGAAGCTGAAGAUGCTGCAACATATUACT | 802 |
| GCAGCCTAAAGAUGTTGCAACTTATUACT | 803 |
| GGAGCCTGAAGAUTTTGCAGTCTATUACT | 804 |
| GGAAGCTGAAGAUGCTGCAACGTATUACT | 805 |
| GCAGCCTGAAGAUATTGCAACATATUACT | 806 |
| GGAGCCTGAAGAUTTGCACTTCAUCACT | 807 |
| GCAGCCTAAAGAUGTTGCAAGTTATUACT | 808 |
| GCAGCCTGAAGAUTTTGCAGTTTATUACT | 809 |
| GCAACCTGAAGAUGTTATAACTTATUGC | 810 |
| GCAGCCTGAAGAUTTTGCAACTTATUACT | 811 |
| GCAACCTGAAGAUGTTATAACTTATUACT | 812 |
| GGAGCCTGAAGAUTTTGCAGTGTATUACT | 813 |
| GCAGCCTGAAGAUTTTGCAACTTACTAUT | 814 |
| GCAGTCTGAAGAUTTTGCAGTTTATUACT | 815 |
| CTGCCTUCCCACACAGGTTCUCC | 816 |
| CTGGAGCCUGAAGATTTGCACTUCAT | 817 |
| GTGGAAGCTAAUGATACTGCAAATUAT | 818 |
| CTGCAGCCUGAAGATTTTGCAGTTUAT | 819 |
| CTGGAGCCUGAAGATTTTGCAGTGUAT | 820 |
| CTGGAGCCUGAAGATTTTGCAGTTUAT | 821 |
| CTGGAAGCTGAAGAUGCTGCAACAUAT | 822 |
| CTGCAGCCUGAAGATTTTGCAACTUAC | 823 |
| CTAGAGCCUGAAGATTTTGCAGTTUAT | 824 |
| CTGCAGTCUGAAGATTTTGCAACTUAT | 825 |
| CTGCAGTCUGAAGATTTTGCAGTTUAT | 826 |
| CTAGACCCUGAAGATGTCACAATTTUAT | 827 |
| CTGGAAGCTGAAGAUGCTGCAGCGUAT | 828 |
| CTGGAGCCUGAAGATTTTGCAGTCUAT | 829 |
| CTGGAGCAUGAAGATTTTGCACTTUAA | 830 |
| CTGCAGCCTGAUGATTTTGCAACTUAT | 831 |
| CTGCAGCCUAAAGATGTTGCAACTUAT | 832 |
| CTGCAGGCUGAAGATGTGGCAGTTUAT | 833 |
| CTGCAGCCUGAAGATGTTGCAACTUAT | 834 |
| CTGCAACCUGAAGATTTTGCAACTUAC | 835 |
| ATAGAATCTGAGGAUGCTGCATATUAC | 836 |
| CTGCAACCUGAAGATTTTGCAACTUAT | 837 |
| CTGCAGCCUAAAGATGTTGCAAGTUAT | 838 |
| CTGCAGCCUGAAGATTTTGCAACTUAT | 839 |
| CTAGAGCCUGAAGATTTTGCAGTGUAT | 840 |
| CTGCAACCUGAAGATGTTATAACTUAT | 841 |
| CTGAAGCCUGAAGATTTTGCAGCTUAT | 842 |
| CTGGAAGCTGAAGAUGCTGCAACGUAT | 843 |
| CTGCAGCCUGAAGATATTGCAACAUAT | 844 |
| CTCCAGTCTGAAGUTGCTGCAACTUCT | 845 |
| CAGTTTTCTGCCUTCCCACACAGGUT | 846 |
| CCTGCAGCCUGAAGATTTUGCA | 847 |
| CCTGCAGGCUGAAGATGUGGCA | 848 |
| CCTGCAGCCUGAAGATGTUGCA | 849 |
| CCTGCAGUCTGAAGATTTUGCA | 850 |
| ACTGGAGCCUGAAGATTTUGCA | 851 |
| TGTGGAAGCUAATGATACUGCA | 852 |
| CCTGCAGCCUGATGATTTUGCA | 853 |
| CCTGGAAGCUGAAGATGCUGCA | 854 |
| CCTAGAGCCUGAAGATTTUGCA | 855 |
| CCTGCAGCCUGAAGATATUGCA | 856 |
| TCTGCAACCUGAAGATTTUGCA | 857 |
| GCTGGAGCAUGAAGATTTUGCA | 858 |
| CCTGCAGCCUAAAGATGTUGCA | 859 |
| CCTCCAGUCTGAAGTTGCUGCA | 860 |
| CCTGCAACCUGAAGATGTTAUA | 861 |
| GCTGGAGCCUGAAGATTUGCA | 862 |
| CCTAGACCCUGAAGATGUCACA | 863 |
| CATAGAATCUGAGGATGCUGCA | 864 |
| CCTGAAGCCUGAAGATTTUGCA | 865 |
| CAGUTTTCTGCCTUCCCACACAGGT | 866 |
| GGGTGGAGGCUGAGGATATUCG | 867 |
| GGACGGAGACCAAGGAUGTUGG | 868 |
| GGGTGGAGGCUGAGGATGTUGG | 869 |
| GGACGGAGACUAAGGATGTUGG | 870 |
| GGATGGATGCUGAGGATGTUGG | 871 |
| AAGTGGAGGCUGAGGATGTUGG | 872 |
| GAGTGGAGGCUGAGGATGTUGG | 873 |
| GGGTGGAGGCUGAGGATTTUGG | 874 |
| GGGTGGAAGCUGAGGATGUCGG | 875 |
| GGGTAGAGGCUGAGGACGTUGG | 876 |
| ACATAGAATCUGAGGATGCUGC | 877 |
| CTGTGGAAGCUAATGATACUGC | 878 |
| ACCTGCAGCCUGAAGATTTUGC | 879 |
| GCCTGCAGCCUGAAGATTTUGC | 880 |
| GTCTGCAACCUGAAGATTTUGC | 881 |
| GCCTGCAACCUGAAGATGTUAT | 882 |
| GCCTGCAGGCUGAAGATGUGGC | 883 |
| TCCTGCAGUCTGAAGATTTUGC | 884 |
| TCCTCCAGUCTGAAGTTGCUGC | 885 |
| GCCTGGAAGCUGAAGATGCUGC | 886 |
| GCCTAGAGCCUGAAGATTTUGC | 887 |
| GCCTGCAGCCUGATGATTTUGC | 888 |
| GACTGGAGCCUGAAGATTTUGC | 889 |
| GCCTGAAGCCUGAAGATTTUGC | 890 |
| TCCTGCAGCCUAAAGATGTUGC | 891 |
| GCCTGCAGUCTGAAGATTTUGC | 892 |
| GGCTGGAGCAUGAAGATTTUGC | 893 |
| GCCTAGACCCUGAAGATGUCAC | 894 |
| GCCTGCAGCCUGAAGATGTUGC | 895 |
| GCCTGCAGCCUGAAGATATUGC | 896 |
| GGCTGGAGCCUGAAGATTUGC | 897 |
| CAATCAGUTTTCTGCCTUCCCACACAGG | 898 |
| CGGGTGGAGGCUGAGGATTTUG | 899 |
| AGGGTGGAGGCUGAGGATGTUG | 900 |
| AGAGTGGAGGCUGAGGATGTUG | 901 |
| TGGGTGGAGGCUGAGGATGTUG | 902 |
| AGGATGGAUGCTGAGGATGTUG | 903 |
| CGGGTGGAGGCUGAGGATGTUG | 904 |
| AGGACGGAGACUAAGGATGTUG | 905 |
| AAAGTGGAGGCUGAGGATGTUG | 906 |
| AGGGTGGAGGCUGAGGATATUC | 907 |
| AGGGTGGAAGCUGAGGATGUCG | 908 |
| AGGGTAGAGGCUGAGGACGTUG | 909 |
| AGGACGGAGACCAAGGAUGTUG | 910 |

TABLE 4
IgL kappa J gene

| | SEQ ID |
|---|---|
| Sequence | NO |
| GTTTGATCTCCACCTTGGTCCCT | 911 |
| GTTTGATTTCCACCTTGGTCCCT | 912 |
| GTTTGATCTCCAGCTTGGTCCCC | 913 |
| GTTTAATCTCCAGTCGTGTCCCT | 914 |
| GTTTGATATCCACTTTGGTCCCA | 915 |
| TTGATCTCCACCTTGGTCCCTCC | 916 |
| TTAATCTCCAGTCGTGTCCCTTG | 917 |
| TTGATATCCACTTTGGTCCCAGG | 918 |
| TTGATTTCCACCTTGGTCCCTTG | 919 |
| TTGATCTCCAGCTTGGTCCCCTG | 920 |
| TCCAGCTTGGTCCCCTGGC | 921 |
| TCCACCTTGGTCCCTCCGC | 922 |
| TCCACTTTGGTCCCAGGGC | 923 |
| TCCACCTTGGTCCCTTGGC | 924 |
| TCCAGTCGTGTCCCTTGGC | 925 |
| CAGTCGTGTCCCTTGGC | 926 |
| CAGCTTGGTCCCCTGGC | 927 |
| CACCTTGGTCCCTTGGC | 928 |
| CACTTTGGTCCCAGGGC | 929 |
| CACCTTGGTCCCTCCGC | 930 |
| GTTTGATCUCCACCTTGGUCCCT | 931 |
| GTTTGATTUCCACCTTGGUCCCT | 932 |
| GTTTGATCUCCAGCTTGGUCCCC | 933 |
| GTTTAATCUCCAGTCGTGUCCCT | 934 |
| GTTTGATAUCCACTTTGGUCCCA | 935 |
| TTGATCTCCACCUTGGTCCCUCC | 936 |
| TTAATCTCCAGUCGTGTCCCTUG | 937 |
| TTGATAUCCACTTTGGUCCCAGG | 938 |
| TTGATTTCCACCUTGGTCCCTUG | 939 |
| TTGATCTCCAGCUTGGTCCCCUG | 940 |
| TCCAGCTUGGTCCCCUGGC | 941 |
| TCCACCTUGGTCCCUCCGC | 942 |
| TCCACUTTGGUCCCAGGGC | 943 |
| TCCACCTUGGTCCCTUGGC | 944 |
| TCCAGTCGUGTCCCTUGGC | 945 |
| CAGTCGUGTCCCTUGGC | 946 |
| CAGCTUGGTCCCCUGGC | 947 |
| CACCTUGGTCCCTUGGC | 948 |
| CACUTTGGUCCCAGGGC | 949 |
| CACCTUGGTCCCUCCGC | 950 |

TABLE 5
KDE-Cint

| | SEQ ID |
|---|---|
| Sequence | NO |
| CTTTGGTGGCCATGCCACCG | 951 |
| CAGCCGCCTTGCCGCTAG | 952 |
| CATGCCACCGCGCTCTTG | 953 |
| CTTTGGUGGCCAUGCCACCG | 954 |
| CAGCCGCCUTGCCGCUAG | 955 |
| CAUGCCACCGCGCTCTUG | 956 |
| AGCCGCGGTCTTTCTCGAT | 957 |
| CGCGGTCTTTCTCGATTGAGT | 958 |
| CCCTGTGTCtgcccgattg | 959 |
| AGCCGCGGUCTTTCUCGAT | 960 |
| CGCGGTCUTTCTCGATUGAGT | 961 |
| CCCTGTGUCTGCCCGATUG | 1837 |
| CTGTAAATAAGCATTATCCTGGGCT | 962 |
| GTAAATAAGCATTATCCTGGGCTGA | 963 |
| CTGCTGTAAATAAGCATTATCCTGGG | 964 |
| CTGTAAAUAAGCATTATCCUGGGCT | 965 |
| GTAAATAAGCATUATCCTGGGCUGA | 966 |
| CTGCTGTAAAUAAGCATTATCCUGGG | 967 |
| CAGACTCATGAGGAGTCGCCCT | 1838 |
| ACTCATGAGGAGTCGCCCTG | 968 |
| CAGCTGCAGACTCATGAGGAGTCG | 969 |
| CAGACTCAUGAGGAGUCGCCCT | 970 |
| ACTCATGAGGAGUCGCCCUG | 971 |
| CAGCTGCAGACUCATGAGGAGUCG | 972 |

TABLE 6
IGH J gene

| | SEQ ID |
|---|---|
| SEQ ID NO | NO |
| GAGGAGACGGTGACCGTG | 973 |
| GAGACAGTGACCAGGGTGC | 974 |
| GAGACGGTGACCATTGTCC | 975 |
| TGAGGAGACGGTGACCAGG | 976 |
| CTTACCTGAGGAGACGGTGACC | 977 |
| GACTCACCTGAGGAGACGGTG | 978 |
| GACTCACCTGAGGAGACAGTG | 979 |
| TTCTTACCTGAGGAGACGGTG | 980 |
| GAGGAGACGGUGACCGUG | 981 |
| GAGACAGUGACCAGGGUGC | 982 |
| GAGACGGUGACCATTGUCC | 983 |
| TGAGGAGACGGUGACCAGG | 984 |
| CTTACCUGAGGAGACGGUGACC | 985 |
| GACTCACCUGAGGAGACGGUG | 986 |
| GACTCACCUGAGGAGACAGUG | 987 |
| TTCTTACCUGAGGAGACGGUG | 988 |

TABLE 7
IGH FR2 gene

| | SEQ ID |
|---|---|
| SEQ ID NO | NO |
| GTGGGCTGGATCCGTCAGC | 989 |
| GTGAGCTGGATCCGTCAGC | 990 |
| GCGAGCTGGATCCGTCAGC | 991 |
| GTGAGCTGGGTCCGTCAGC | 992 |
| GCACTGGGTCCGTCAAG | 993 |
| GTACTGGGTCCGCCAGG | 994 |
| GCACTGGGTCCGCCAGG | 995 |
| GGACTGGGTCCGCCAGG | 996 |
| GAACTGGGTCCGCCAGG | 997 |
| GAGCTGGTTCCGCCAGG | 998 |
| GAGCTGGGTCCGCCAGG | 999 |
| GCACTGGGTCCGGCAAG | 1000 |
| GCACTGGGTCCGCCAAG | 1001 |
| GAGCTGGATCCGCCAGG | 1002 |
| GAGCTGGGTCCGCCAGC | 1003 |
| GAGCTGGGTCCGCCAAG | 1004 |
| CTGCACTGGGTGCGACAGG | 1005 |
| ATCAACTGGGTGCGACAGG | 1006 |
| ATGAATTGGGTGCGACAGG | 1007 |
| ATCAGCTGGGTGCGACAGG | 1008 |
| ATGCACTGGGTGCGACAGG | 1009 |
| ATGCATTGGGTGCGCCAGG | 1010 |
| ATGCAGTGGGTGCGACAGG | 1011 |
| ATGCACTGGGTGCAACAGG | 1012 |
| GTGCAGTGGGTGCGACAGG | 1013 |
| GAGCTGGATCCGGCAGC | 1014 |
| GAGCTGGATCCGCCAGC | 1015 |
| GAGTTGGGTCCGCCAGC | 1016 |
| GAACTGGATCAGGCAGT | 1017 |
| GGGCTGGATCCGGCAGC | 1018 |
| GGGCTGGATCCGCCAGC | 1019 |
| GAGCTGGATCCGGCAGT | 1020 |
| GTGCTGGATCCGCCAGC | 1021 |
| GAGTTGGATCCGCCAGC | 1022 |
| ACCGGCTGGGTGCGCCAGA | 1023 |
| ATCAGCTGGGTGCGCCAGA | 1024 |
| ATCGGCTGGGTGCACCAGA | 1025 |
| ATCGGCTGGGTGCGCCAGA | 1026 |
| GTGGGCUGGATCCGUCAGC | 1027 |
| GTGAGCUGGATCCGUCAGC | 1028 |
| GCGAGCUGGATCCGUCAGC | 1029 |
| GTGAGCUGGGTCCGUCAGC | 1030 |
| GCACUGGGTCCGUCAAG | 1031 |
| GUACTGGGUCCGCCAGG | 1032 |
| GCACUGGGUCCGCCAGG | 1033 |
| GGACUGGGUCCGCCAGG | 1034 |
| GAACUGGGUCCGCCAGG | 1035 |
| GAGCUGGTUCCGCCAGG | 1036 |
| GAGCUGGGUCCGCCAGG | 1037 |
| GCACUGGGUCCGGCAAG | 1038 |
| GCACUGGGUCCGCCAAG | 1039 |
| GAGCUGGAUCCGCCAGG | 1040 |
| GAGCUGGGUCCGCCAGC | 1041 |
| GAGCUGGGUCCGCCAAG | 1042 |
| CUGCACTGGGUGCGACAGG | 1043 |
| AUCAACTGGGUGCGACAGG | 1044 |
| AUGAATTGGGUGCGACAGG | 1045 |
| AUCAGCTGGGUGCGACAGG | 1046 |
| AUGCACTGGGUGCGACAGG | 1047 |
| AUGCATTGGGUGCGCCAGG | 1048 |
| AUGCAGTGGGUGCGACAGG | 1049 |
| ATGCACUGGGUGCAACAGG | 1050 |
| GUGCAGTGGGUGCGACAGG | 1051 |
| GAGCUGGAUCCGGCAGC | 1052 |
| GAGCUGGAUCCGCCAGC | 1053 |
| GAGUTGGGUCCGCCAGC | 1054 |
| GAACUGGAUCAGGCAGT | 1055 |
| GGGCUGGAUCCGGCAGC | 1056 |
| GGGCUGGAUCCGCCAGC | 1057 |
| GAGCUGGAUCCGGCAGT | 1058 |
| GUGCTGGAUCCGCCAGC | 1059 |
| GAGUTGGAUCCGCCAGC | 1060 |
| ACCGGCUGGGUGCGCCAGA | 1061 |
| AUCAGCTGGGUGCGCCAGA | 1062 |
| ATCGGCUGGGUGCACCAGA | 1063 |
| ATCGGCUGGGUGCGCCAGA | 1064 |

TABLE 8
IGH FR3distal gene

| | SEQ |
|---|---|
| Sequence | ID NO |
| TCTACAGCACAUCCCUGAAGACC | 1065 |
| TCTACAGCACAUCTCUGAAGACC | 1066 |
| ACTACAGCACAUCTCUGAACACC | 1067 |
| GCTACGGCCCAUCTCUGAAGAGC | 1068 |
| ACTACAGCACAUCTCUGAAGACC | 1069 |
| GCTACAGCCCAUCTCUGAAGAGC | 1070 |
| CCTACAGCACAUCTCUGAAGAGC | 1071 |
| TATCCAGGCUCCGUGAAGGGG | 1072 |
| TACACAGACUCCGUGAAGGGC | 1073 |
| TATGCAGACUCTGUGAAGGGC | 1074 |
| TACGGAGACUCCGUGAAGGGC | 1075 |
| TATGUGGACTCTGUGAAGGGC | 1076 |
| TATGCAGACUCCGUGAAGGGC | 1077 |
| TACACAGACUCTGUGAAGGGC | 1078 |
| TATGCAGACUCTGUGAAGGGT | 1079 |
| TACGCAGACUCAGUGAAGGGC | 1080 |
| TACGCGGACUCCGUGAAGGGC | 1081 |
| TATGCGGACUCTGUGAAGGGC | 1082 |
| TACGCAGACUCCGUGAAGGGC | 1083 |
| TATGCAAACUCTGUGAAGGGC | 1084 |
| TAUGCAGACUCCGCGAAGGGC | 1085 |
| TACGCAGACUCTGUGAAGGGC | 1086 |
| TATCCAGGCUCCGUGAAGGGC | 1087 |
| CGCUGCACCTGUGAAAGGC | 1088 |
| CGCCGCGUCTGUGAAAGGC | 1089 |
| TGCTGCGUCGGUGAAAGGC | 1090 |
| CACCGCGUCTGUGAAAGGC | 1091 |
| CGCUGCACCCGUGAAAGGC | 1092 |
| AACAACAACCCCUCCCUCAAGAGT | 1093 |
| AACTACAACCCGUCCCUCAAGAGT | 1094 |
| TACTACAACCCGUCCCUCAAGAGT | 1095 |
| AACAACAACCCGUCCCUCAAGAGT | 1096 |
| AACTACAACCCCUCCCUCAAGAGT | 1097 |
| ATATUCACAGGAGTUCCAGGGC | 1098 |
| ATATUCACAGAAGTUCCAGGGC | 1099 |
| CTAUGCACAGAAGTTUCAGGGC | 1100 |
| CTAUGCACAGAAGCUCCAGGGC | 1101 |
| AUACGCAGAGAAGTUCCAGGGC | 1102 |
| CUACGCACAGAAGTUCCAGGGC | 1103 |
| CUACGCACAGAAATUCCAGGAC | 1104 |
| CUACGCACAGAAGTUCCAGGAA | 1105 |
| CTAUGCACAGAAGTUCCAGGGC | 1106 |
| ATAUGCAGAGAAGTUCCAGGGC | 1107 |
| CUACGCACAGAAGTUGCAGGGC | 1108 |
| GATTATGCAGUATCTGUGAAAAGT | 1109 |
| ACGTAUGCCCAGGGCTUCACAGGA | 1110 |
| CTACAGCCCGUCCTUCCAAGGC | 1111 |
| ATACAGCCCGUCCTUCCAAGGC | 1112 |
| TCTACAGCACATCCCTGAAGACC | 1113 |
| TCTACAGCACATCTCTGAAGACC | 1114 |
| ACTACAGCACATCTCTGAACACC | 1115 |
| GCTACGGCCCATCTCTGAAGAGC | 1116 |
| ACTACAGCACATCTCTGAAGACC | 1117 |
| GCTACAGCCCATCTCTGAAGAGC | 1118 |
| CCTACAGCACATCTCTGAAGAGC | 1119 |
| TATCCAGGCTCCGTGAAGGGG | 1120 |
| TACACAGACTCCGTGAAGGGC | 1121 |
| TATGCAGACTCTGTGAAGGGC | 1122 |
| TACGGAGACTCCGTGAAGGGC | 1123 |
| TATGTGGACTCTGTGAAGGGC | 1124 |
| TATGCAGACTCCGTGAAGGGC | 1125 |
| TACACAGACTCTGTGAAGGGC | 1126 |
| TATGCAGACTCTGTGAAGGGT | 1127 |
| TACGCAGACTCAGTGAAGGGC | 1128 |
| TACGCGGACTCCGTGAAGGGC | 1129 |
| TATGCGGACTCTGTGAAGGGC | 1130 |
| TACGCAGACTCCGTGAAGGGC | 1131 |
| TATGCAAACTCTGTGAAGGGC | 1132 |
| TATGCAGACTCCGCGAAGGGC | 1133 |
| TACGCAGACTCTGTGAAGGGC | 1134 |
| TATCCAGGCTCCGTGAAGGGC | 1135 |
| CGCTGCACCTGTGAAAGGC | 1136 |
| CGCCGCGTCTGTGAAAGGC | 1137 |
| TGCTGCGTCGGTGAAAGGC | 1138 |
| CACCGCGTCTGTGAAAGGC | 1139 |
| CGCTGCACCCGTGAAAGGC | 1140 |
| AACAACAACCCCTCCCTCAAGAGT | 1141 |
| AACTACAACCCGTCCCTCAAGAGT | 1142 |
| TACTACAACCCGTCCCTCAAGAGT | 1143 |
| AACAACAACCCGTCCCTCAAGAGT | 1144 |
| AACTACAACCCCTCCCTCAAGAGT | 1145 |
| ATATTCACAGGAGTTCCAGGGC | 1146 |
| ATATTCACAGAAGTTCCAGGGC | 1147 |
| CTATGCACAGAAGTTTCAGGGC | 1148 |
| CTATGCACAGAAGCTCCAGGGC | 1149 |
| ATACGCAGAGAAGTTCCAGGGC | 1150 |
| CTACGCACAGAAGTTCCAGGGC | 1151 |
| CTACGCACAGAAATTCCAGGAC | 1152 |
| CTACGCACAGAAGTTCCAGGAA | 1153 |
| CTATGCACAGAAGTTCCAGGGC | 1154 |
| ATATGCAGAGAAGTTCCAGGGC | 1155 |
| CTACGCACAGAAGTTGCAGGGC | 1156 |
| GATTATGCAGTATCTGTGAAAAGT | 1157 |
| ACGTATGCCCAGGGCTTCACAGGA | 1158 |
| CTACAGCCCGTCCTTCCAAGGC | 1159 |
| ATACAGCCCGTCCTTCCAAGGC | 1160 |

TABLE 9
IGH FR3V gene

| | SEQ |
|---|---|
| | ID |
| Sequence | NO |
| CATGCAGCTGAGCAGCC | 1161 |
| CATGGAGCTGAGCAGGC | 1162 |
| GGAGCTGAGCAGCCTGA | 1163 |
| AGAGCTGAGCAGCCTGA | 1164 |
| GGAGCTGAGGAGCCTGA | 1165 |
| CACAGACCTGAGCAGCCT | 1166 |
| TGGAGCTAAGCAGCCTGA | 1167 |
| CATGGAGCTGAGGAGCCTA | 1168 |
| ATGGAGCTAAGCAGTCTGAGATC | 1169 |
| TCCTTACCATGACCAACATGGAC | 1170 |
| GTGGTCCTTACAATGACCAACATG | 1171 |
| GGTTCTAACAGTGATCAACATGGAC | 1172 |
| ACACGGCGTATCTGCAAATGAA | 1173 |
| CACGCTGTATGTCCAAATGAGC | 1174 |
| AACACGCTCTACCTGCAAATGAA | 1175 |
| GAACTCACCGTATCTGCAAACGAA | 1176 |
| GAACACGCTGTATGTTCAAATGAG | 1177 |
| GAACACGCTGTTTCTGCAAATGAA | 1178 |
| AAGCATCGCCTATCTGCAAATGAA | 1179 |
| GAACACCCTGTATCTGCAAACGAA | 1180 |
| AGAACACGCTGTATCTGCAAATGAG | 1181 |
| GGAACTCCCTGTATCTGCAAAAGAA | 1182 |
| GCAAGTCCCTGTATCTGCAAAAGAA | 1183 |
| GAACACGCTGCATCTTCAAATGAAC | 1184 |
| GAACTCACTCCGTTTGCAAATGAAC | 1185 |
| GAACACGCTGTATCTGCAAATGAAC | 1186 |
| AAGAACACGCTGTATCTTCAAATGGG | 1187 |
| AAGAACTCCCTCTATCTGCAAGTGAA | 1188 |
| AAGAACAGGCTGTATCTGCAAATGAA | 1189 |
| CAAAAACTCCCTGTATCTGCAAATGAA | 1190 |
| TAAGAACTCACCGTATCTCCAAACGAA | 1191 |
| CCAGAATTCACTGTCTCTGCAAATGAA | 1192 |
| CAGGAACTTCCTGTATCAGCAAATGAA | 1193 |
| CAAGAACACGCTGTATCTTCAAATGAG | 1194 |
| CAAGAACTCCCTGTATCTGCAAATGAA | 1195 |
| CAAGAACTCACTCTGTTTGCAAATGAA | 1196 |
| CAAAAAACACGCTGTATCTGCAAATGAT | 1197 |
| CAAAGAACACGATGTATCTGCAAATGAG | 1198 |
| CAAGAACTCACTGTATCTGCAAATGAAC | 1199 |
| CCAAGAACTCACTGTATTTGCTAATGAA | 1200 |
| CCAAGAACTCACTGTATTTGCAAATGAA | 1201 |
| CCAATAACTCACCGTATCTGCAAATGAA | 1202 |
| CAAAAAACACGCTGTATCTGCAAATGAA | 1203 |
| CAAGAACACGCTGTATCTTCAAATGAAC | 1204 |
| CAAAAGCATCACCTATCTGCAAATGAAC | 1205 |
| CAAGAACACACTTCATCTGCAAATGAAC | 1206 |
| CAAAAGCATCACCTATCTGCAAATGAAG | 1207 |
| TCAAAGAACTCACTGTATCTGCAAATGAA | 1208 |
| GCTAAGAACTCTCTGTATCTGCAAATGAA | 1209 |
| CCAAGAACTCCTTGTATCTTCAAATGAAC | 1210 |
| CCAAGAAGTCCTTGTATCTTCAAATGAAC | 1211 |
| GCCAAGAAGTCCTTGTATCTTCATATGAAC | 1212 |
| CAGTTCCCCCTGAAGCTGA | 1213 |
| CAGTTCTCCCTGAAGCTGGG | 1214 |
| CAGTTCTCCCTGAAGCCGAG | 1215 |
| CCAGTTCTCCCTGAAGCTGAG | 1216 |
| AACCAGTTCTCCCTGAACCTGA | 1217 |
| AACCACTTCTCCCTGAAGCTGA | 1218 |
| GAACCAATTCTCCCTGAAGCTGA | 1219 |
| AGAACCAGTTCTACCTGAAGCTGA | 1220 |
| AGAAGCAGTTCTACCTGAAGCTGA | 1221 |
| GCAGTGGAGCAGCCTGA | 1222 |
| CAGTTCTCCCTGCAGCTGA | 1223 |
| ATCTGCAGATCAGCACGCTAA | 1224 |
| TATCTGCAGATCAGCAGCCTAA | 1225 |
| TGTCTTCAGATCAGCAGCCTAA | 1226 |
| TACCTGCAGATCAGCAGCCTAA | 1227 |
| TATCTGCAGATCTGCAGCCTAA | 1228 |
| TGGAGCTGAGCAGCCTGAGATCTGA | 1229 |
| CAATGACCAACATGGACCCTGTGGA | 1230 |
| TCTGCAAATGAACAGCCTGAGAGCC | 1231 |
| GAGCTCTGTGACCGCCGCGGACACG | 1232 |
| CAGCACCGCCTACCTGCAGTGGAGC | 1233 |
| GTTCTCCCTGCAGCTGAACTCTGTG | 1234 |
| CAGCACGGCATATCTGCAGATCAG | 1235 |
| CACAGTCTACATGGAGCTGAGC | 1236 |
| CACAGCCTACATGCAGCTGAGC | 1237 |
| CACAGCCTACACGGAGCTGAGC | 1238 |
| CACAGCCTACATGGAGCTGAGG | 1239 |
| CACAGCCTACACAGACCTGAGC | 1240 |
| CACAGCCTGCACGGAGCTGAGC | 1241 |
| CACAGCCTACATGGAGCTAAGC | 1242 |
| CACAGCCTACATGGAGCTGAGC | 1243 |
| GACAGCCTACATAGAGCTGAGC | 1244 |
| CAAGAATGAAGTGGTTCTAACAGTGA | 1245 |
| CAAAAACCAGGTGGTCCTTACAATGA | 1246 |
| CAAAAGCCAGGTGGTCCTTACCATGA | 1247 |
| AACACGCTCTACCTGCAAATGAACAGC | 1248 |
| AAGTCCTTGTATCTTCAAATGAACAGC | 1249 |
| AAGTCCCTGTATCTGCAAAAGAACAGA | 1250 |
| AACACGCTGTATCTGCAAATGAACAGC | 1251 |
| AACTCCCTGTATCTGCAAAAGAACAGA | 1252 |
| AACTCTCTGTATCTGCAAATGAACACT | 1253 |
| AATTCACTGTCTCTGCAAATGAACAGC | 1254 |
| AACTCACTGTATTTGCAAATGAACAGT | 1255 |
| AACTCACCGTATCTGCAAACGAACAGT | 1256 |
| AACACGCTGTATGTTCAAATGAGCAGT | 1257 |
| AACTCACTCTGTTTGCAAATGAACAGT | 1258 |
| AACACGCTGCATCTTCAAATGAACAGC | 1259 |
| AAGTCCTTGTATCTTCATATGAACAGC | 1260 |
| AACACGCTGTATCTGCAAATGATCAGC | 1261 |
| AACTCACTCCGTTTGCAAATGAACAGT | 1262 |
| AACACGCTGTTTCTGCAAATGAACAGC | 1263 |
| AACTCCTTGTATCTTCAAATGAACAGC | 1264 |
| AACTTCCTGTATCAGCAAATGAACAGC | 1265 |
| AACACGCTGTATCTTCAAATGAACAGC | 1266 |
| AACTCACCGTATCTGCAAATGAACAGC | 1267 |
| AACTCACTGTATCTGCAAATGAACAGC | 1268 |
| AACACGATGTATCTGCAAATGAGCAAC | 1269 |
| AGCATCACCTATCTGCAAATGAACAGC | 1270 |
| AACACGCTGTATCTTCAAATGAGCAGT | 1271 |
| AACTCTCTGTATCTGCAAATGAACAGT | 1272 |
| AACACGCTGTATGTCCAAATGAGCAGT | 1273 |
| AACACGGCGTATCTGCAAATGAACAGC | 1274 |
| AGCATCACCTATCTGCAAATGAAGAGC | 1275 |
| AACACGCTGTATCTTCAAATGAACAAC | 1276 |
| AACACGCTGTATCTGCAAATGAACAGT | 1277 |
| AACTCCCTCTATCTGCAAGTGAACAGC | 1278 |
| AACTCCCTGTATCTGCAAATGAACAGT | 1279 |
| AGCATCGCCTATCTGCAAATGAACAGC | 1280 |
| AACACGCTGTATCTGCAAATGAGCAAC | 1281 |
| AACACCCTGTATCTGCAAACGAATAGC | 1282 |
| AACACACTTCATCTGCAAATGAACAGC | 1283 |
| AACAGGCTGTATCTGCAAATGAACAGC | 1284 |
| AACTCACCGTATCTCCAAACGAACAGT | 1285 |
| AACACGCTGTATCTTCAAATGGGCAGC | 1286 |
| AACTCACTGTATTTGCTAATGAACAGT | 1287 |
| AACACGCTGTATCTGCAAATGAGCAGC | 1288 |
| CCTGAAGCTGAGCTCTGTGACTG | 1289 |
| CCTGAAGCCGAGCTCTGTGACTG | 1290 |
| CCTGAACCTGAGCTCTGTGACCG | 1291 |
| CCTGAAGCTGAGCTCTGTGACCG | 1292 |
| CCTGAAGCTGGGCTCTGTGACCG | 1293 |
| GACAAGTCCATCAGCACCGCCTACC | 1294 |
| GACAGCTCCAGCAGCACCGCCTACC | 1295 |
| GACAAGCCCATCAGCACCGCCTACC | 1296 |
| GACAAGTCCATCAGCACTGCCTACC | 1297 |
| CAGTTCTCCCTGCAGCTGAACTCT | 1298 |
| ACACCTCTGTCAGCATGGCGTA | 1299 |
| ACACCTCTGTCAGCACGGCATA | 1300 |
| ACACCTCTGCCAGCACAGCATA | 1301 |
| ACACGTCTGTCAGCACGGCGTG | 1302 |
| ACACCTCTGTCAGCATGGCATA | 1303 |
| CAUGCAGCUGAGCAGCC | 1304 |
| CAUGGAGCUGAGCAGGC | 1305 |
| GGAGCUGAGCAGCCUGA | 1306 |
| AGAGCUGAGCAGCCUGA | 1307 |
| GGAGCUGAGGAGCCUGA | 1308 |
| CACAGACCTGAGCAGCCT | 1309 |
| TGGAGCUAAGCAGCCUGA | 1310 |
| CATGGAGCUGAGGAGCCUA | 1311 |
| ATGGAGCUAAGCAGTCTGAGAUC | 1312 |
| TCCTTACCAUGACCAACAUGGAC | 1313 |
| GTGGTCCTUACAATGACCAACAUG | 1314 |
| GGTTCTAACAGUGATCAACAUGGAC | 1315 |
| ACACGGCGUATCTGCAAAUGAA | 1316 |
| CACGCTGUATGTCCAAAUGAGC | 1317 |
| AACACGCTCUACCTGCAAAUGAA | 1318 |
| GAACUCACCGTATCUGCAAACGAA | 1319 |
| GAACACGCUGTATGTTCAAAUGAG | 1320 |
| GAACACGCUGTTTCTGCAAAUGAA | 1321 |
| AAGCATCGCCUATCTGCAAAUGAA | 1322 |
| GAACACCCUGTATCUGCAAACGAA | 1323 |
| AGAACACGCUGTATCTGCAAAUGAG | 1324 |
| GGAACUCCCTGTATCUGCAAAAGAA | 1325 |
| GCAAGUCCCTGTATCUGCAAAAGAA | 1326 |
| GAACACGCUGCATCTTCAAAUGAAC | 1327 |
| GAACTCACUCCGTTTGCAAAUGAAC | 1328 |
| GAACACGCUGTATCTGCAAAUGAAC | 1329 |
| AAGAACACGCUGTATCTTCAAAUGGG | 1330 |
| AAGAACTCCCUCTATCTGCAAGUGAA | 1331 |
| AAGAACAGGCUGTATCTGCAAAUGAA | 1332 |
| CAAAAACTCCCUGTATCTGCAAAUGAA | 1333 |
| TAAGAACUCACCGTATCUCCAAACGAA | 1334 |
| CCAGAATTCACUGTCTCTGCAAAUGAA | 1335 |
| CAGGAACTTCCUGTATCAGCAAAUGAA | 1336 |
| CAAGAACACGCUGTATCTTCAAAUGAG | 1337 |
| CAAGAACTCCCUGTATCTGCAAAUGAA | 1338 |
| CAAGAACTCACUCTGTTTGCAAAUGAA | 1339 |
| CAAAAAACACGCUGTATCTGCAAAUGAT | 1340 |
| CAAAGAACACGAUGTATCTGCAAAUGAG | 1341 |
| CAAGAACTCACUGTATCTGCAAAUGAAC | 1342 |
| CCAAGAACTCACUGTATTTGCTAAUGAA | 1343 |
| CCAAGAACTCACUGTATTTGCAAAUGAA | 1344 |
| CCAATAACTCACCGUATCTGCAAAUGAA | 1345 |
| CAAAAAACACGCUGTATCTGCAAAUGAA | 1346 |
| CAAGAACACGCUGTATCTTCAAAUGAAC | 1347 |
| CAAAAGCATCACCUATCTGCAAAUGAAC | 1348 |
| CAAGAACACACUTCATCTGCAAAUGAAC | 1349 |
| CAAAAGCATCACCUATCTGCAAAUGAAG | 1350 |
| TCAAAGAACTCACUGTATCTGCAAAUGAA | 1351 |
| GCTAAGAACTCUCTGTATCTGCAAAUGAA | 1352 |
| CCAAGAACTCCUTGTATCTTCAAAUGAAC | 1353 |
| CCAAGAAGTCCUTGTATCTTCAAAUGAAC | 1354 |
| GCCAAGAAGTCCUTGTATCTTCATAUGAAC | 1355 |
| CAGTTCCCCCUGAAGCUGA | 1356 |
| CAGTTCUCCCTGAAGCUGGG | 1357 |
| CAGUTCTCCCUGAAGCCGAG | 1358 |
| CCAGTTCUCCCTGAAGCUGAG | 1359 |
| AACCAGTTCUCCCTGAACCUGA | 1360 |
| AACCACTTCUCCCTGAAGCUGA | 1361 |
| GAACCAATTCUCCCTGAAGCUGA | 1362 |
| AGAACCAGTTCUACCTGAAGCUGA | 1363 |
| AGAAGCAGTTCUACCTGAAGCUGA | 1364 |
| GCAGUGGAGCAGCCUGA | 1365 |
| CAGTTCUCCCTGCAGCUGA | 1366 |
| ATCTGCAGAUCAGCACGCUAA | 1367 |
| TATCTGCAGAUCAGCAGCCUAA | 1368 |
| TGTCTTCAGAUCAGCAGCCUAA | 1369 |
| TACCTGCAGAUCAGCAGCCUAA | 1370 |
| TATCTGCAGAUCTGCAGCCUAA | 1371 |
| TGGAGCUGAGCAGCCTGAGATCUGA | 1372 |
| CAATGACCAACAUGGACCCTGUGGA | 1373 |
| TCTGCAAAUGAACAGCCUGAGAGCC | 1374 |
| GAGCUCTGUGACCGCCGCGGACACG | 1375 |
| CAGCACCGCCUACCTGCAGUGGAGC | 1376 |
| GTTCTCCCUGCAGCTGAACTCTGUG | 1377 |
| CAGCACGGCAUATCTGCAGAUCAG | 1378 |
| CACAGTCUACATGGAGCUGAGC | 1379 |
| CACAGCCUACATGCAGCUGAGC | 1380 |
| CACAGCCUACACGGAGCUGAGC | 1381 |
| CACAGCCUACATGGAGCUGAGG | 1382 |
| CACAGCCUACACAGACCUGAGC | 1383 |
| CACAGCCUGCACGGAGCUGAGC | 1384 |
| CACAGCCUACATGGAGCUAAGC | 1385 |
| CACAGCCUACATGGAGCUGAGC | 1386 |
| GACAGCCUACATAGAGCUGAGC | 1387 |
| CAAGAATGAAGUGGTTCTAACAGUGA | 1388 |
| CAAAAACCAGGUGGTCCTTACAAUGA | 1389 |
| CAAAAGCCAGGUGGTCCTTACCAUGA | 1390 |
| AACACGCTCUACCTGCAAAUGAACAGC | 1391 |
| AAGTCCTTGUATCTTCAAAUGAACAGC | 1392 |
| AAGUCCCTGTATCUGCAAAAGAACAGA | 1393 |
| AACACGCTGUATCTGCAAAUGAACAGC | 1394 |
| AACUCCCTGTATCUGCAAAAGAACAGA | 1395 |
| AACTCTCTGUATCTGCAAAUGAACACT | 1396 |
| AATTCACTGUCTCTGCAAAUGAACAGC | 1397 |
| AACTCACTGUATTTGCAAAUGAACAGT | 1398 |
| AACUCACCGTATCUGCAAACGAACAGT | 1399 |
| AACACGCUGTATGTTCAAAUGAGCAGT | 1400 |
| AACTCACTCUGTTTGCAAAUGAACAGT | 1401 |
| AACACGCUGCATCTTCAAAUGAACAGC | 1402 |
| AAGTCCTTGUATCTTCATAUGAACAGC | 1403 |
| AACACGCTGUATCTGCAAATGAUCAGC | 1404 |
| AACTCACUCCGTTTGCAAAUGAACAGT | 1405 |
| AACACGCTGUTTCTGCAAAUGAACAGC | 1406 |
| AACTCCTTGUATCTTCAAAUGAACAGC | 1407 |
| AACTTCCTGUATCAGCAAAUGAACAGC | 1408 |
| AACACGCUGTATCTTCAAAUGAACAGC | 1409 |
| AACTCACCGUATCTGCAAAUGAACAGC | 1410 |
| AACTCACTGUATCTGCAAAUGAACAGC | 1411 |
| AACACGATGUATCTGCAAAUGAGCAAC | 1412 |
| AGCATCACCUATCTGCAAAUGAACAGC | 1413 |
| AACACGCUGTATCTTCAAAUGAGCAGT | 1414 |
| AACTCTCTGUATCTGCAAAUGAACAGT | 1415 |
| AACACGCTGUATGTCCAAAUGAGCAGT | 1416 |
| AACACGGCGUATCTGCAAAUGAACAGC | 1417 |
| AGCATCACCUATCTGCAAAUGAAGAGC | 1418 |
| AACACGCUGTATCTTCAAAUGAACAAC | 1419 |
| AACACGCTGUATCTGCAAAUGAACAGT | 1420 |
| AACTCCCTCUATCTGCAAGUGAACAGC | 1421 |
| AACTCCCTGUATCTGCAAAUGAACAGT | 1422 |
| AGCATCGCCUATCTGCAAAUGAACAGC | 1423 |
| AACACGCTGUATCTGCAAAUGAGCAAC | 1424 |
| AACACCCTGTAUCTGCAAACGAAUAGC | 1425 |
| AACACACTUCATCTGCAAAUGAACAGC | 1426 |
| AACAGGCTGUATCTGCAAAUGAACAGC | 1427 |
| AACUCACCGTATCUCCAAACGAACAGT | 1428 |
| AACACGCUGTATCTTCAAAUGGGCAGC | 1429 |
| AACTCACTGUATTTGCTAAUGAACAGT | 1430 |
| AACACGCTGUATCTGCAAAUGAGCAGC | 1431 |
| CCTGAAGCUGAGCTCTGTGACUG | 1432 |
| CCTGAAGCCGAGCUCTGTGACUG | 1433 |
| CCTGAACCUGAGCTCTGUGACCG | 1434 |
| CCTGAAGCUGAGCTCTGUGACCG | 1435 |
| CCTGAAGCUGGGCTCTGUGACCG | 1436 |
| GACAAGTCCAUCAGCACCGCCUACC | 1437 |
| GACAGCUCCAGCAGCACCGCCUACC | 1438 |
| GACAAGCCCAUCAGCACCGCCUACC | 1439 |
| GACAAGTCCAUCAGCACTGCCUACC | 1440 |
| CAGTTCTCCCUGCAGCTGAACUCT | 1441 |
| ACACCTCTGUCAGCATGGCGUA | 1442 |
| ACACCTCTGUCAGCACGGCAUA | 1443 |
| ACACCTCUGCCAGCACAGCAUA | 1444 |
| ACACGTCTGUCAGCACGGCGUG | 1445 |
| ACACCTCTGUCAGCATGGCAUA | 1446 |

TABLE 10
IGH Leader gene

| | SEQ |
|---|---|
| | ID |
| Sequence | NO |
| GCACCTGGAGGATCCTCCTCTTG | 1467 |
| GCACCTGGAGGATCCTCTTCTTG | 1468 |
| GGATTTGGAGGATCCTCTTCTTG | 1469 |
| GGACCTGGAGGGTCTTCTGCTTG | 1470 |
| GGATTTGGAGGGTCCTCTTCTTG | 1471 |
| GGACCTGGAGAATCCTCTTCTTG | 1472 |
| GGACCTGGAGGTTCCTCTTTGTG | 1473 |
| GGACCTGGAGCATCCTTTTCTTG | 1474 |
| GGACCTGGAGGATCCTCTTTTTG | 1475 |
| GGACCTGGAGGATCCTCTTCTTG | 1476 |
| CTTTGTTCCACGCTCCTGCTG | 1477 |
| CTTTGCTACACACTCCTGCTG | 1478 |
| CTTTGCTCCACGCTCCTGCTG | 1479 |
| CTTTGTTCCACGCTCCTGCTA | 1480 |
| TTGGGCTGAGCTGGGTTTTCCTC | 1481 |
| TGGGGCTGAGCTGGGTTTTCCTT | 1482 |
| TGGGACTGAGCTGGATTTTCCTT | 1483 |
| TTGGGCTGAGCTGGCTTTTTCTT | 1484 |
| TTGGGCTGAGCTGGATTTTCCTT | 1485 |
| TTGGACTGAGCTGGGTTTTCCTT | 1486 |
| TGGGGCTGTGCTGGGTTTTCCTT | 1487 |
| TTGGGCTTAGCTGGGTTTTCCTT | 1488 |
| TTGGGCTGAGCTGGGTTTTCCTT | 1489 |
| TCTGGCTGAGCTGGGTTCTCCTT | 1490 |
| TTTGGCTGAGCTGGGTTTTCCTT | 1491 |
| TGGGGCTCCGCTGGGTTTTCCTT | 1492 |
| CATCTGTGGTTCTTCCTTCTCCTG | 1493 |
| CACCTGTGGTTTTTCCTCCTGCTG | 1494 |
| CACCTGTGGTTCTTCCTCCTGCTG | 1495 |
| CACCTGTGGTTCTTCCTCCTCCTG | 1496 |
| CACCTGTGGTTCTTTCTCCTCCTG | 1497 |
| CACCTGTGGTTCTTCCTGCTCCTG | 1498 |
| GAAAAGACTACATGATTGCTGAGCTGTT | 1499 |
| GGGCCTCTCCACTTAAACCCAGG | 1500 |
| CGCCATCCTCGCCCTCCTC | 1501 |
| CCTTCCTCATCTTCCTGCCCGTG | 1502 |
| CCTTCCTCATCTTCCTGCCGTG | 1503 |
| GCACCTGGAGGAUCCTCCTCTUG | 1504 |
| GCACCTGGAGGAUCCTCTTCTUG | 1505 |
| GGATTTGGAGGAUCCTCTTCTUG | 1506 |
| GGACCTGGAGGGUCTTCTGCTUG | 1507 |
| GGATTTGGAGGGUCCTCTTCTUG | 1508 |
| GGACCTGGAGAAUCCTCTTCTUG | 1509 |
| GGACCTGGAGGUTCCTCTTTGUG | 1510 |
| GGACCTGGAGCAUCCTTTTCTUG | 1511 |
| GGACCTGGAGGAUCCTCTTTTUG | 1512 |
| GGACCTGGAGGAUCCTCTTCTUG | 1513 |
| CTTTGTTCCACGCUCCTGCUG | 1514 |
| CTTTGCUACACACTCCTGCUG | 1515 |
| CTTTGCUCCACGCTCCTGCUG | 1516 |
| CTTTGTTCCACGCUCCTGCUA | 1517 |
| TTGGGCTGAGCUGGGTTTTCCUC | 1518 |
| TGGGGCTGAGCUGGGTTTTCCUT | 1519 |
| TGGGACTGAGCUGGATTTTCCUT | 1520 |
| TTGGGCTGAGCUGGCTTTTTCUT | 1521 |
| TTGGGCTGAGCUGGATTTTCCUT | 1522 |
| TTGGACTGAGCUGGGTTTTCCUT | 1523 |
| TGGGGCTGUGCTGGGTTTTCCUT | 1524 |
| TTGGGCTTAGCUGGGTTTTCCUT | 1525 |
| TTGGGCTGAGCUGGGTTTTCCUT | 1526 |
| TCTGGCTGAGCUGGGTTCTCCUT | 1527 |
| TTTGGCTGAGCUGGGTTTTCCUT | 1528 |
| TGGGGCTCCGCUGGGTTTTCCUT | 1529 |
| CATCTGTGGTUCTTCCTTCTCCUG | 1530 |
| CACCTGTGGTUTTTCCTCCTGCUG | 1531 |
| CACCTGTGGTUCTTCCTCCTGCUG | 1532 |
| CACCTGTGGTUCTTCCTCCTCCUG | 1533 |
| CACCTGTGGTUCTTTCTCCTCCUG | 1534 |
| CACCTGTGGTUCTTCCTGCTCCUG | 1535 |
| GAAAAGACTACAUGATTGCTGAGCTGUT | 1536 |
| GGGCCUCTCCACTUAAACCCAGG | 1537 |
| CGCCATCCUCGCCCTCCUC | 1538 |
| CCTTCCTCATCUTCCTGCCCGUG | 1539 |
| CCTTCCTCAUCTTCCTGCCGUG | 1540 |

TABLE 11
IgH V gene FR1

| | SEQ |
|---|---|
| | ID |
| Sequence | NO |
| AGTGAAGGTTTCCTGCAAGGCAT | 1541 |
| AGTGAAGGTCTCCTGCAAGGTTT | 1542 |
| AGTGAAGGTTTCCTGCAAGGCTT | 1543 |
| AGTGAAGGTCTCCTGCAAGGCTT | 1544 |
| AGTGAAAATCTCCTGCAAGGTTT | 1545 |
| GGTGAAGGTCTCCTGCAAGGCTT | 1546 |
| ACGCTGACCTGCACCTTCT | 1547 |
| ACGCTGACCCGCACCTTCT | 1548 |
| ACACTGACCTGCGCCTTCT | 1549 |
| ACGCTGACCTGCACCGTCT | 1550 |
| ACACTGACCTGCACCTTCT | 1551 |
| CTGAAACTCTCCTGTGCAGCCT | 1552 |
| CTGAGACTCTCCTTTGCAGCCT | 1553 |
| CTGAGACTCTCCTGTTCAGCCT | 1554 |
| CTTAGACTCTCCTGTGCAGCCT | 1555 |
| CTGAGACTCTCCTGTGCAGCCT | 1556 |
| CTGAGACTCTCCTGTGCAGCGT | 1557 |
| CTGAGACTCTCCTGTACAGCTT | 1558 |
| GTCCCTCACCTGCGCTGTCT | 1559 |
| GTCCCTCACCTGTACTGTCT | 1560 |
| GTCCCTCACCTGCACTGTCT | 1561 |
| GTCCCTCACCTGCGCTATCT | 1562 |
| GTCCCTCACCTGCACTGTCA | 1563 |
| GTCTCTGAAGATCTCCTGTAAGGGTT | 1564 |
| GTCTCTGAGGATCTCCTGTAAGGGTT | 1565 |
| CCTCTCACTCACCTGTGCCATCT | 1566 |
| AGTGAAGGTTTCCTGCAAGGCTT | 1567 |
| GGGCTGAGGTGAAGAAGCTTG | 1568 |
| GAGCTGAGGTGAAGAAGCCTG | 1569 |
| GGTCTGAGTTGAAGAAGCCTG | 1570 |
| GGGCTGAGGTGAAGAAGACTG | 1571 |
| GGCCTGAGGTGAAGAAGCCTG | 1572 |
| GGGCTGAGGTGAAGAAGCCTG | 1573 |
| GTCTGGTCCTACGCTGGTAAAA | 1574 |
| GTCTGGTCCTGCGCTGGTGAAA | 1575 |
| GTCTGGTCCTGTGCTGGTGAAA | 1576 |
| GTCTGGTCCTACGCTGGTGAAA | 1577 |
| GGTCCCTTAGACTCTCCTGTG | 1578 |
| GGTCCCTGAGACTCTCCTGTA | 1579 |
| CGTCCCTGAGACTCTCCTGTA | 1580 |
| GGTCCCTGAAACTCTCCTGTG | 1581 |
| GGTCCCTGAGACTCTCCTTTG | 1582 |
| GGGCCCTGAGACTCTCCTGTG | 1583 |
| GGTCCCTGAGACTCTCCTGTT | 1584 |
| GGTCCCTGAGACTCTCCTGTG | 1585 |
| GGGCGCAGGACTGTTGAAG | 1586 |
| AGGTCCAGGACTGGTGAAG | 1587 |
| CGGCTCAGGACTGGTGAAG | 1588 |
| GGGCCCAGGACTGTTGAAG | 1589 |
| GGGCCCAGGACTGGTGAAG | 1590 |
| AGGTCCGGGACTGGTGAAG | 1591 |
| GCAGTCTGGAGCAGAGGTGAAA | 1592 |
| GCAGTCCGGAGCAGAGGTGAAA | 1593 |
| GGCTGAGGTGAAGAAGCCTGG | 1594 |
| AGCTGAGGTGAAGAAGCCTGG | 1595 |
| GCCTGAGGTGAAGAAGCCTGG | 1596 |
| GGCTGAGGTGAAGAAGCTTGG | 1597 |
| GGCTGAGGTGAAGAAGACTGG | 1598 |
| GTCTGAGTTGAAGAAGCCTGG | 1599 |
| GTCCTACGCTGGTGAAACCC | 1600 |
| GTCCTGTGCTGGTGAAACCC | 1601 |
| GTCCTGCGCTGGTGAAACCC | 1602 |
| GTCCTACGCTGGTAAAACCC | 1603 |
| GTCCAGGACTGGTGAAGCCC | 1604 |
| GCCCAGGACTGTTGAAGCCT | 1605 |
| GTCCGGGACTGGTGAAGCCC | 1606 |
| GCTCAGGACTGGTGAAGCCT | 1607 |
| GCCCAGGACTGGTGAAGCCT | 1608 |
| GCGCAGGACTGTTGAAGCCT | 1609 |
| GCAGTCCGGAGCAGAGGTGAAAA | 1610 |
| GCAGTCTGGAGCAGAGGTGAAAA | 1611 |
| GGTCTGAGTTGAAGAAGCCTGG | 1612 |
| GGCCTGAGGTGAAGAAGCCTGG | 1613 |
| GGGCTGAGGTGAAGAAGACTGG | 1614 |
| GGGCTGAGGTGAAGAAGCTTGG | 1615 |
| GAGCTGAGGTGAAGAAGCCTGG | 1616 |
| GGGCTGAGGTGAAGAAGCCTGG | 1617 |
| CCTGCGCTGGTGAAACCCAC | 1618 |
| CCTGTGCTGGTGAAACCCAC | 1619 |
| CCTACGCTGGTGAAACCCAC | 1620 |
| CCTACGCTGGTAAAACCCAC | 1621 |
| GGCTGAGGTGAAGAAGCCTGGG | 1622 |
| GCCTGAGGTGAAGAAGCCTGGG | 1623 |
| GGCTGAGGTGAAGAAGCTTGGG | 1624 |
| AGCTGAGGTGAAGAAGCCTGGG | 1625 |
| GTCTGAGTTGAAGAAGCCTGGG | 1626 |
| GGCTGAGGTGAAGAAGACTGGG | 1627 |
| TGCGCTGGTGAAACCCACAC | 1628 |
| TACGCTGGTAAAACCCACAC | 1629 |
| TGTGCTGGTGAAACCCACAG | 1630 |
| TACGCTGGTGAAACCCACAC | 1631 |
| TCCTCGGTGAAGGTCTCCTGCA | 1632 |
| GCCTCAGTGAAGGTCTCCTGCA | 1633 |
| TCCTCAGTGAAGGTCTCCTGCA | 1634 |
| ACCTCAGTGAAGGTCTCCTGCA | 1635 |
| GCCTCAGTGAAGGTTTCCTGCA | 1636 |
| TCCTCAGTGAAGGTTTCCTGCA | 1637 |
| GCTACAGTGAAAATCTCCTGCA | 1638 |
| CAGACCCTCACACTGACCTG | 1639 |
| GAGACCCTCACGCTGACCTG | 1640 |
| CAGACCCTCACGCTGACCTG | 1641 |
| CAGACCCTCACGCTGACCCG | 1642 |
| CTGTCCCTCACCTGTACTGT | 1643 |
| CCGTCCCTCACCTGCACTGT | 1644 |
| CTCTCACTCACCTGTGCCAT | 1645 |
| CTGTCCCTCACCTGCACTGT | 1646 |
| CTGTCCCTCACCTGCGCTAT | 1647 |
| CTGTCCCTCACCTGCGCTGT | 1648 |
| GGGAGTCTCTGAGGATCTCCTGTA | 1649 |
| GGGAGTCTCTGAAGATCTCCTGTA | 1650 |
| TCGGTGAAGGTCTCCTGCAAGG | 1651 |
| TCAGTGAAGGTTTCCTGCAAGG | 1652 |
| ACAGTGAAAATCTCCTGCAAGG | 1653 |
| TCAGTGAAGGTCTCCTGCAAGG | 1654 |
| TCACGCTGACCTGCACCGT | 1655 |
| TCACGCTGACCCGCACCTT | 1656 |
| TCACACTGACCTGCGCCTT | 1657 |
| TCACACTGACCTGCACCTT | 1658 |
| TCACGCTGACCTGCACCTT | 1659 |
| CCCTGAGACTCTCCTGTACAGC | 1660 |
| CCCTGAGACTCTCCTGTTCAGC | 1661 |
| CCCTGAGACTCTCCTTTGCAGC | 1662 |
| CCCTGAAACTCTCCTGTGCAGC | 1663 |
| CCCTGAGACTCTCCTGTGCAGC | 1664 |
| CCCTTAGACTCTCCTGTGCAGC | 1665 |
| GAGTCTCTGAAGATCTCCTGTAAGGG | 1666 |
| GAGTCTCTGAGGATCTCCTGTAAGGG | 1667 |
| GTGAAGGTCTCCTGCAAGGCTTCT | 1668 |
| GTGAAAATCTCCTGCAAGGTTTCT | 1669 |
| GTGAAGGTTTCCTGCAAGGCATCT | 1670 |
| GTGAAGGTTTCCTGCAAGGCTTCT | 1671 |
| GTGAAGGTTTCCTGCAAGGCTTCC | 1672 |
| GTGAAGGTCTCCTGCAAGGTTTCC | 1673 |
| ACGCTGACCCGCACCTTCTC | 1674 |
| ACGCTGACCTGCACCTTCTC | 1675 |
| ACGCTGACCTGCACCGTCTC | 1676 |
| ACACTGACCTGCGCCTTCTC | 1677 |
| ACACTGACCTGCACCTTCTC | 1678 |
| GTCCCTCACCTGCACTGTCTC | 1679 |
| GTCCCTCACCTGTACTGTCTC | 1680 |
| GTCCCTCACCTGCGCTATCTC | 1681 |
| GTCCCTCACCTGCACTGTCAC | 1682 |
| CTCACTCACCTGTGCCATCTC | 1683 |
| GTCCCTCACCTGCGCTGTCTA | 1684 |
| GTCCCTCACCTGCGCTGTCTC | 1685 |
| GTCTCTGAGGATCTCCTGTAAGGGTTC | 1686 |
| GTCTCTGAAGATCTCCTGTAAGGGTTC | 1687 |
| AGTGAAGGUTTCCUGCAAGGCAT | 1688 |
| AGTGAAGGTCUCCTGCAAGGTUT | 1689 |
| AGTGAAGGTTUCCTGCAAGGCUT | 1690 |
| AGTGAAGGTCUCCTGCAAGGCUT | 1691 |
| AGTGAAAATCUCCTGCAAGGTUT | 1692 |
| GGTGAAGGTCUCCTGCAAGGCUT | 1693 |
| ACGCTGACCUGCACCTUCT | 1694 |
| ACGCUGACCCGCACCTUCT | 1695 |
| ACACTGACCUGCGCCTUCT | 1696 |
| ACGCTGACCUGCACCGUCT | 1697 |
| ACACTGACCUGCACCTUCT | 1698 |
| CTGAAACUCTCCTGUGCAGCCT | 1699 |
| CTGAGACUCTCCTTUGCAGCCT | 1700 |
| CTGAGACUCTCCTGTUCAGCCT | 1701 |
| CTTAGACUCTCCTGUGCAGCCT | 1702 |
| CTGAGACUCTCCTGUGCAGCCT | 1703 |
| CTGAGACUCTCCTGUGCAGCGT | 1704 |
| CTGAGACTCUCCTGTACAGCUT | 1705 |
| GTCCCTCACCUGCGCTGUCT | 1706 |
| GTCCCUCACCTGTACTGUCT | 1707 |
| GTCCCTCACCUGCACTGUCT | 1708 |
| GTCCCTCACCUGCGCTAUCT | 1709 |
| GTCCCTCACCUGCACTGUCA | 1710 |
| GTCTCTGAAGAUCTCCTGTAAGGGUT | 1711 |
| GTCTCTGAGGAUCTCCTGTAAGGGUT | 1712 |
| CCTCTCACUCACCTGTGCCAUCT | 1713 |
| AGTGAAGGTTUCCTGCAAGGCUT | 1714 |
| GGGCTGAGGUGAAGAAGCTUG | 1715 |
| GAGCTGAGGUGAAGAAGCCUG | 1716 |
| GGTCTGAGTUGAAGAAGCCUG | 1717 |
| GGGCTGAGGUGAAGAAGACUG | 1718 |
| GGCCTGAGGUGAAGAAGCCUG | 1719 |
| GGGCTGAGGUGAAGAAGCCUG | 1720 |
| GTCTGGTCCUACGCTGGUAAAA | 1721 |
| GTCTGGTCCUGCGCTGGUGAAA | 1722 |
| GTCTGGTCCUGTGCTGGUGAAA | 1723 |
| GTCTGGTCCUACGCTGGUGAAA | 1724 |
| GGTCCCTUAGACTCTCCTGUG | 1725 |
| GGTCCCUGAGACTCTCCTGUA | 1726 |
| CGTCCCUGAGACTCTCCTGUA | 1727 |
| GGTCCCUGAAACTCTCCTGUG | 1728 |
| GGTCCCUGAGACTCTCCTTUG | 1729 |
| GGGCCCUGAGACTCTCCTGUG | 1730 |
| GGTCCCUGAGACTCTCCTGUT | 1731 |
| GGTCCCUGAGACTCTCCTGUG | 1732 |
| GGGCGCAGGACUGTUGAAG | 1733 |
| AGGUCCAGGACTGGUGAAG | 1734 |
| CGGCUCAGGACTGGUGAAG | 1735 |
| GGGCCCAGGACUGTUGAAG | 1736 |
| GGGCCCAGGACUGGUGAAG | 1737 |
| AGGUCCGGGACTGGUGAAG | 1738 |
| GCAGTCUGGAGCAGAGGUGAAA | 1739 |
| GCAGUCCGGAGCAGAGGUGAAA | 1740 |
| GGCTGAGGUGAAGAAGCCUGG | 1741 |
| AGCTGAGGUGAAGAAGCCUGG | 1742 |
| GCCTGAGGUGAAGAAGCCUGG | 1743 |
| GGCTGAGGUGAAGAAGCTUGG | 1744 |
| GGCTGAGGUGAAGAAGACUGG | 1745 |
| GTCTGAGTUGAAGAAGCCUGG | 1746 |
| GTCCUACGCTGGUGAAACCC | 1747 |
| GTCCTGUGCTGGUGAAACCC | 1748 |
| GTCCUGCGCTGGUGAAACCC | 1749 |
| GTCCUACGCTGGUAAAACCC | 1750 |
| GTCCAGGACUGGUGAAGCCC | 1751 |
| GCCCAGGACUGTUGAAGCCT | 1752 |
| GTCCGGGACUGGUGAAGCCC | 1753 |
| GCUCAGGACTGGUGAAGCCT | 1754 |
| GCCCAGGACUGGUGAAGCCT | 1755 |
| GCGCAGGACUGTUGAAGCCT | 1756 |
| GCAGUCCGGAGCAGAGGUGAAAA | 1757 |
| GCAGTCUGGAGCAGAGGUGAAAA | 1758 |
| GGTCTGAGTUGAAGAAGCCUGG | 1759 |
| GGCCTGAGGUGAAGAAGCCUGG | 1760 |
| GGGCTGAGGUGAAGAAGACUGG | 1761 |
| GGGCTGAGGUGAAGAAGCTUGG | 1762 |
| GAGCTGAGGUGAAGAAGCCUGG | 1763 |
| GGGCTGAGGUGAAGAAGCCUGG | 1764 |
| CCUGCGCTGGUGAAACCCAC | 1765 |
| CCUGTGCTGGUGAAACCCAC | 1766 |
| CCUACGCTGGUGAAACCCAC | 1767 |
| CCUACGCTGGUAAAACCCAC | 1768 |
| GGCTGAGGUGAAGAAGCCUGGG | 1769 |
| GCCTGAGGUGAAGAAGCCUGGG | 1770 |
| GGCTGAGGUGAAGAAGCTUGGG | 1771 |
| AGCTGAGGUGAAGAAGCCUGGG | 1772 |
| GTCTGAGTUGAAGAAGCCUGGG | 1773 |
| GGCTGAGGUGAAGAAGACUGGG | 1774 |
| TGCGCUGGUGAAACCCACAC | 1775 |
| TACGCUGGUAAAACCCACAC | 1776 |
| TGUGCTGGUGAAACCCACAG | 1777 |
| TACGCUGGUGAAACCCACAC | 1778 |
| TCCTCGGUGAAGGTCTCCUGCA | 1779 |
| GCCTCAGUGAAGGTCTCCUGCA | 1780 |
| TCCTCAGUGAAGGTCTCCUGCA | 1781 |
| ACCTCAGUGAAGGTCTCCUGCA | 1782 |
| GCCTCAGUGAAGGTTTCCUGCA | 1783 |
| TCCTCAGUGAAGGTTTCCUGCA | 1784 |
| GCTACAGUGAAAATCTCCUGCA | 1785 |
| CAGACCCUCACACTGACCUG | 1786 |
| GAGACCCUCACGCTGACCUG | 1787 |
| CAGACCCUCACGCTGACCUG | 1788 |
| CAGACCCUCACGCUGACCCG | 1789 |
| CTGTCCCUCACCTGTACUGT | 1790 |
| CCGTCCCUCACCTGCACUGT | 1791 |
| CTCTCACUCACCTGUGCCAT | 1792 |
| CTGTCCCUCACCTGCACUGT | 1793 |
| CTGTCCCUCACCTGCGCUAT | 1794 |
| CTGTCCCUCACCTGCGCUGT | 1795 |
| GGGAGTCTCUGAGGATCTCCTGUA | 1796 |
| GGGAGTCTCUGAAGATCTCCTGUA | 1797 |
| TCGGUGAAGGTCTCCUGCAAGG | 1798 |
| TCAGUGAAGGTTTCCUGCAAGG | 1799 |
| ACAGTGAAAAUCTCCUGCAAGG | 1800 |
| TCAGTGAAGGUCTCCUGCAAGG | 1801 |
| TCACGCUGACCUGCACCGT | 1802 |
| TCACGCUGACCCGCACCUT | 1803 |
| TCACACTGACCUGCGCCUT | 1804 |
| TCACACUGACCTGCACCUT | 1805 |
| TCACGCUGACCTGCACCUT | 1806 |
| CCCTGAGACUCTCCTGUACAGC | 1807 |
| CCCTGAGACUCTCCTGTUCAGC | 1808 |
| CCCTGAGACUCTCCTTUGCAGC | 1809 |
| CCCTGAAACUCTCCTGUGCAGC | 1810 |
| CCCTGAGACUCTCCTGUGCAGC | 1811 |
| CCCTTAGACUCTCCTGUGCAGC | 1812 |
| GAGTCTCUGAAGATCTCCTGUAAGGG | 1813 |
| GAGTCTCUGAGGATCTCCTGUAAGGG | 1814 |
| GTGAAGGTCUCCTGCAAGGCTUCT | 1815 |
| GTGAAAATCUCCTGCAAGGTTUCT | 1816 |
| GTGAAGGTTUCCTGCAAGGCAUCT | 1817 |
| GTGAAGGTTUCCTGCAAGGCTUCT | 1818 |
| GTGAAGGTTUCCTGCAAGGCTUCC | 1819 |
| GTGAAGGTCUCCTGCAAGGTTUCC | 1820 |
| ACGCUGACCCGCACCTTCUC | 1821 |
| ACGCTGACCUGCACCTTCUC | 1822 |
| ACGCTGACCUGCACCGTCUC | 1823 |
| ACACTGACCUGCGCCTTCUC | 1824 |
| ACACTGACCUGCACCTTCUC | 1825 |
| GTCCCTCACCUGCACTGTCUC | 1826 |
| GTCCCTCACCUGTACTGTCUC | 1827 |
| GTCCCTCACCUGCGCTATCUC | 1828 |
| GTCCCTCACCUGCACTGUCAC | 1829 |
| CTCACTCACCUGTGCCATCUC | 1830 |
| GTCCCTCACCUGCGCTGTCUA | 1831 |
| GTCCCTCACCUGCGCTGTCUC | 1832 |
| GTCTCTGAGGAUCTCCTGTAAGGGTUC | 1833 |
| GTCTCTGAAGATCUCCTGTAAGGGTUC | 1834 |
| AGTGAAGGTCUCCTGCAAGGTUT | 1835 |
| AGTGAAGGTTUCCTGCAAGGCUT | 1836 |

[0292] The following description of various exemplary embodiments is exemplary and explanatory only and is not to be construed as limiting or restrictive in any way. Other embodiments, features, objects, and advantages of the present teachings will be apparent from the description and accompanying drawings, and from the claims.

[0293] Although the present description described in detail certain exemplary embodiments, other embodiments are also possible and within the scope of the present invention. Variations and modifications will be apparent to those skilled in the art from consideration of the specification and FIGURES and practice of the teachings described in the specification and FIGURES, and the claims.

### EXEMPLIFICATION

[0294] Provided immune repertoire compositions include, without limitation, reagents designed for library preparation and sequencing of rearranged genomic IgH, IGkappa and IGlambda sequences. Generally, gDNA and/or total RNA was extracted from samples (e.g., blood samples, sorted cell samples, normal tissue sample, tumor samples, (e.g., fresh, frozen, FFPE, of various types)); libraries were generated, templates prepared, e.g., using Ion Chef™ or Ion OneTouch™ 2 System, then prepared templates were sequenced using next generation sequencing technology, e.g., an Ion S5™ System, an Ion GeneStudio S5™ System and sequence analysis was performed using Ion Reporter™ software. Kits suitable for extracting and/or isolating genomic DNA from biological samples are commercially available from, for example, Thermo Fisher Scientific and BioChain Institute Inc.

### Example 1

[0295] In the examples herein, exemplary sets of forward and reverse primers comprising SEQ ID Nos 785-816, 847-876, 960-961, 972, 931-935, 941-945, 981-988, and 1304-1446 from Tables 1-9 were used. In one multiplex assay, sets of forward and reverse primers targeting the framework 3 (FR3) portion of the variable gene and the joining gene region of heavy- and light-chain loci (IGH, IGK, IGL) were included for amplifying sequences for alleles found within the IMGT database of B cell genomic DNA, enabling readout of the complementary-determining region 3 (CDR3) sequence of each immunoglobulin chain. To maximize sensitivity, primers to amplify IGK loci rearrangements involving Kappa deletion and C intron elements were also included. In addition, reflex assays were used to assess extended regions of the IGH sequence (FR3distal-J and FR2distal-J). Performance of assays was evaluated by clonality assessment and limit-of-detection testing following sequence analysis. Testing used gDNA from research samples representing common B cell malignancies, including B cell lines (ATCC, DSMZ) and clinical research samples (Cureline), including samples derived from peripheral blood, bone marrow, and FFPE-preserved tissues. Sequencing was performed on the Ion GeneStudio S5 and analysis using Ion Reporter 5.16.

[0296] Briefly, multiplex amplification reactions were performed as follows. To a single well of a 96-well PCR plate 200 ng prepared gDNA, 4 microliters of 5×BCR IGH-IGK-IGL panel (200 nM IgH forward and reverse primer and 100 nM IgK/IgL final concentration of primer pool), 4 microliters of 5× Ion AmpliSeg™ HiFi Mix (an amplification reaction mixture that can include glycerol, dNTPs, and Platinum® Taq High Fidelity DNA Polymerase (Invitrogen, Catalog No. 11304)), 2 microliters dNTP Mix (6 mM each dNTP, prepared in advance), and 2 microliters DNase/RNase free water were added to bring final reaction volume to 20 microliters. The 1 pool FR2-J and FR3d-J reactions were prepared in the same manner.

[0297] The PCR plate was sealed, reaction mixtures mixed, and loaded into a thermal cycler (e.g., Veriti™ 96-well thermal cycler (Applied Biosystems)) and run on the following temperature profile to generate the amplicon library. An initial holding stage was performed at 95° C. for 2 minutes, followed by about 20 cycles of a denaturing stage at 95° C. for 30 seconds, an annealing stage at 60° C. for 45 seconds, and an extending stage for 72° C. for 45 seconds. After cycling, a final extension 72° C. for 10 minutes was performed and the amplicon library was held at 10° C. until proceeding. Typically, about 20 cycles are used to generate the amplicon library. For some applications, up to 30 cycles can be used.

[0298] The amplicon sample was briefly centrifuged to collect contents before proceeding. To the amplicon library (˜20 microliters), 2 microliters of FuPa reagent was added. The reaction mixture was sealed, mixed thoroughly to ensure uniformity and incubated at 50° C. for 10 minutes, 55° C. for 10 minutes, 60° C. for 20 minutes, then held at 10° C. for up to 1 hour. The sample was briefly centrifuged to collect contents before proceeding.

[0299] After incubation, the reaction mixture proceeded directly to a ligation step. Here, the reaction mixture now containing the phosphorylated amplicon library was combined with 2 microliters of Ion Select Barcode Adapters, 5 μM each (Thermo Fisher Scientific), 4 microliters of AmpliSeq Plus Switch Solution (sold as a component of the Ion AmpliSeg™ Library Kit Plus, Thermo Fisher Scientific) and 2 microliters of DNA ligase, added last (sold as a component of the Ion AmpliSeg™ Library Kit Plus, Thermo Fisher Scientific), then incubated at the following: 22° C. for 30 minutes, 68° C. for 5 minutes, 72° C. for 5 minutes, then held at 10° C. for up to 1 hour. The sample was briefly centrifuged to collect contents before proceeding.

[0300] After the incubation step, 45 microliters (1.5× sample volume) of room temperature AMPure® XP beads (Beckman Coulter) was added to ligated DNA and the mixture was pipetted thoroughly to mix the bead suspension with the DNA. The mixture was incubated at room temperature for 5 minutes, placed on a magnetic rack such as a DynaMag™-96 side magnet (Invitrogen, Part No. 12331D) for two minutes. After the solution had cleared, the supernatant was discarded. Without removing the plate from the magnetic rack, 150 microliters of freshly prepared 70% ethanol was introduced into the sample and incubated while gently rotating the tube on the magnetic rack. After the solution cleared, the supernatant was discarded without disturbing the pellet. A second ethanol wash was performed, the supernatant discarded, and any remaining ethanol was removed by pulse-spinning the tube and carefully removing residual ethanol while not disturbing the pellet. The pellet was air-dried for about 5 minutes at room temperature. The ligated DNA was eluted from the beads in 50 microliters of low TE buffer.

[0301] Eluted libraries were quantitated by qPCR using the Ion Library TaqMan® Quantitation Kit (Ion Torrent, Cat. No. 4468802), according to manufacturer instructions. After quantification, the libraries were diluted to a concentration of about 100 pM.

[0302] Libraries were normalized to 20 pM and aliquots of the final libraries were used in template preparation and chip loading using the Ion Chef™ instrument according to the manufacturer instructions. Sequencing was performed using Ion 540™ chips on the Ion GeneStudio SS™ System according to manufacturer instructions, and gene sequence analysis was performed with the Ion Torrent Suite™ 5.16 software.

[0303] Exemplary sequencing data for two of the cell lines is shown in Table 12. Similar results were obtained across cell lines.

TABLE 12

| | | Mean Read | Total | Productive | Clones | Shannon | |
|---|---|---|---|---|---|---|---|
| Analysis | Sample | Length | Reads | Read % | Detected | Diversity | Evenness |
| IGK/L | BDCM_Cell_Line_PBL | 84 | 1,557,828 | 42.32 | 3110 | 10.2838 | 0.8863 |
| | CRL- | 91 | 1,278,221 | 42.57 | 3179 | 10.1882 | 0.8757 |
| | 2975_Cell_Line_PBL | | | | | | |
| IGH | BDCM_Cell_Line_PBL | 84 | 1,557,828 | 64.94 | 2668 | 10.5336 | 0.9255 |
| | CRL- | 91 | 1,278,221 | 64.67 | 2755 | 10.6605 | 0.9329 |
| | 2975_Cell_Line_PBL | | | | | | |

[0304] Clonality Assessment provides a means to identify the dominating clone (>˜10% frequency), and determine the sequence (e.g., CDR3 sequence) of a potential clone of interest. 27 B cell lines derived from a variety of B cell malignancies (including B-ALL, CLL, Multiple Myeloma, Non-Hodgkin's Lymphoma) were profiled. See Table 13. Cell line samples were diluted 1:100 in PBL gDNA using the Pan-Clonality IGH/K/L assay, as well as the FR3(d)-J and FR2-J reflex assays as described above.

TABLE 13
Cell Lines

| Cell Line | Research Model |
|---|---|
| BDCM | B-ALL |
| MOLT-3 | T-ALL |
| MOLT-4 | T-ALL |
| Loucy | T-ALL |
| SUP-T1 | T-ALL |
| HT | B cell Lymphoma (unspecified) |
| JM1 | B cell Lymphoma (unspecified) |
| MC116 | B cell Lymphoma (unspecified) |
| NU-DUL-1 | B cell Lymphoma (unspecified) |
| RL | B cell Lymphoma (unspecified) |
| NALM-1 | Blast Phase CML |
| JVM-2 | CLL - small lymphocytic lymphoma |
| Pfeiffer | Diffuse large B cell lymphoma |
| SU-DHL-10 | Diffuse large B cell lymphoma |
| SU-DHL-6 | Diffuse large B cell lymphoma |
| SU-DHL-8 | Diffuse large B cell lymphoma |
| Hs 611.T | Hodgkin's Lymphoma |
| HuT 78 | Mycosis fungoides - Sezary Syndrome |
| CA-46 | Burkitt's Lymphoma |
| Ramos | Burkitt's Lymphoma |
| BCP-1 | Body cavity-based lymphoma |
| Daudi | Burkitt's Lymphoma |
| GA-10 | Burkitt's Lymphoma |
| Toledo | Non-Hodgkin's Lymphoma |
| DS-1B | lymphangiectasia |
| U266B1 | myeloma; plasmacytoma |
| IM-9 | Multiple Myeloma |
| WSU-NHL | Non-Hodgkin's Lymphoma |
| GM14952 | B-ALL |

[0305] Results of clonality assessment are depicted in Table 14. Boxes indicate positive detection with the number of rearrangements detected. Positive detection of at least one rearrangement (IGH, IGK, IGL, KDE/Cint) was found in 25/27 cell lines tested, demonstrating a 93% positive detection rate.

TABLE 14
B Cell Line Clonality Detection

| Cell Line | Published | IGH-SR | IGH | | | | IGH | IGH |
|---|---|---|---|---|---|---|---|---|
| Name | rearrangements | (V1) | (V2) | IGK | IGL | KDE/Cint | FR3(d)-J | FR2-J |
| WSU-NHL | Unknown | — | — | 2 | 1 | 1 | — | — |
| CA46 | IGH, IGK [1] | 2 | 2 | 1 | — | — | 1 | 1 |
| Toledo | IGK, IGL [1] | — | — | 1 | 2 | 1 | — | — |
| GA-10 | IGH, IGK [1] | 1 | 1 | 1 | — | — | 1 | 1 |
| Daudi | IGH, IGK [1] | — | — | — | — | 1 | 1 | 1 |
| | | | | | | (IGKV-KDE) | | |
| U266B1 | IGH, IGK, IGL [1] | — | — | — | 1 | 1 | — | — |
| GM14952 | Unknown | 1 | 1 | — | 2 | — | 1 | 1* |
| Ramos | IGK [2] | — | 1** | — | 2 | — | 1 | 1 |
| RL | IGL [1] IGH [7] | | — | — | — | 1 | 1 | 1 |
| HS611.T | IGH, IGK [1] | | 1 | 2 | — | 1 | 1 | — |
| SU-DHL-6 [8] | IGH, IGK [1] | | — | 1* | — | — | — | — |
| BDCM | IGH, IGL, | | 1 | — | 1 | 1 + 1 | 1 | — |
| | TRA [1] | | | | | (IGKV-KDE) | | |
| SU-DHL-8 | IGH, IGK, | | — | — | 1 | — | — | 1 |
| | IGL, TRA [1] | | | | | | | |
| GM04154 | Unknown | | 1 | — | 1 | — | 1 | 1 |
| IM9 | IGH, IGK [3] | | — | — | 1* | — | 1 | — |
| MM.1R (CRL- | IGL [4] | | 1 | — | 1 | 1 | 1 | — |
| 2975) | | | | | | | | |
| NALM-1 | IGH, IGL, TRA [1] | | 2 | 1 | — | — | 1 | 1 |
| DS-1B | IGH (IgG), IGK [5] | | — | — | — | — | — | — |
| HT | IGH, IGK [1] | | — | 1 | — | — | 1 | 1 |
| JVM-2 | IGH, IGL [1] | | 1 | — | 1 | — | 1 | 1 |
| LP1 (ACC41) | IGL [6] | | — | — | 1* | 1 | 1 | 1* |
| | | | | | | (IGKV-KDE) | | |
| JM1 | IGK, IGL, TRA [1] | | — | — | 1 | 1 | — | — |
| Pfeiffer | IGH, IGK, IGL [1] | | 1 | — | — | — | 1 | 1 |
| MC116 | IGH, IGK, IGL [1] | | — | — | 1 | — | — | — |
| TMM-ACC | Unknown | | 1 | — | — | 1 | 1 | — |
| | | | | | | (IGKV-KDE) | | |
| NU-DUL-1 | IGH, IGK, IGL [1] | | — | 1 | 1 | — | — | — |
| BCP-1 | IGH [1] | | 1 | — | — | — | 1 | 1 |

*Detection of rearrangement at low frequency indicating potential of SHM prohibiting efficient priming
**Analysis reports single clone with two entries possibly due to on-going SHM

### Example 2

[0306] Detection of clonality in clinical research samples: 20 clinical research samples from a variety of B cell malignancies (including, e.g., MM—Multiple Myeloma, CLL—Chronic Lymphocytic Leukemia, B-ALL—Bcell Acute Lymphoblastic Leukemia, and DLBCL—Diffuse Large B cell Lymphoma) were profiled using the Pan Clonality (IGH/K/L) assay associated reflex assays using methods described in Example 1 above. Exemplary sequencing data for clinical samples is shown in Table 15. Similar results were obtained across cell lines.

[0307] Table 16 depicts the results of clonality assessment of the samples. Boxes indicate positive detection with the number of rearrangements detected. Positive detection of at least one rearrangement (IGH, IGK, IGL,KDE/Cint) was found in 19 of 20 cell lines assessed using the assay, demonstrating 95% positive rate using the single assay approach.

TABLE 15

| | | Input | Total | Total | | |
|---|---|---|---|---|---|---|
| | | Amount | Productive | Clones | Shannon | |
| Sample | Sample Type | (ng gDNA) | Reads | Detected | Diversity | Evenness |
| MM-11 | PBMC | 100 | 985384 | 2513 | 4.7529 | 0.4208 |
| CLL-3 | BMMC | 100 | 449851 | 120 | 0.6297 | 0.0912 |
| MM-13 | BM Aspirate | 30 | 34854 | 118 | 5.5671 | 0.8089 |
| MM-3 | BMMC | 100 | 4842 | 43 | 4.3718 | 0.8057 |
| CLL-2 | PBMC | 100 | 408200 | 45 | 0.0416 | 0.0076 |
| MM-2 | BM Aspirate | 50 | 462509 | 3907 | 8.1646 | 0.6843 |
| CLL-1 | BM Aspirate | 50 | 379073 | 43 | 0.0414 | 0.0076 |
| CLL-2 | PBMC | 100 | 455316 | 159 | 0.5654 | 0.0773 |
| DLBCL-1 | FFPE tissue | 100 | 72499 | 384 | 6.4051 | 0.7461 |
| DLBCL-2 | FFPE tissue | 100 | 966 | 5 | 0.9221 | 0.3971 |

TABLE 16
Clinical Sample Clonality Detection

| Sample Name | IGH | IGK | IGL | KDE/Cint |
|---|---|---|---|---|
| MM-1_BMMC | — | 2 | — | — |
| MM-2_BMasp_FF_StageIIIA | — | — | — | — |
| MM-3_BMMC_FF_StageI_IgA | — | 2 | — | — |
| MM-4 | — | 1 | 1 | — |
| MM-5 | — | 2 | — | — |
| MM-6 | 1 | 1 | — | — |
| MM-7 | 1 | 1 | — | 1-IGKdel |
| MM-8 | 1 | — | — | — |
| MM-9 | 1 | 2 | — | — |
| MM-10 | — | 1 | 1 | — |
| MM-11 | 1 | 1 | — | — |
| MM-12 | 1 | 1 | — | 1-IGKdel |
| MM-13_BMA | — | 2 | — | 1 |
| CLL-1_BMaspirate_FF | 1 | — | 2 | — |
| CLL-2_PMC_FF | 1 | — | 2 | — |
| CLL-3_BMMC_FF | 1 | 1 | 1 | — |
| CLL-4_PBMC_FF | 1 | 1 | 1 | 1 |
| B-ALL-1_PBMC | 1 | — | — | — |
| DLBCL-1_FFPE | — | — | — | 1 |
| DLBCL-1_FFPE | — | — | 1 | 1 |

### Example 3

[0308] Linearity/Limit-of-detection of the single reaction Pan-Clonality (IGH/K/L) assay using a BDCM cell line. Linearity of response of detection of a BDCM cell line spike-in to a background of PBL gDNA was determined by preparing diluted samples then determining detection of BDCM rearrangements using the Pan-Clonality assay as described in Example 1 above. Cell line gDNA was serially diluted in PBL gDNA from 1:10 to 1:10⁶ then prepared samples were assessed using a single library reaction. Sequencing data for clinical samples is shown in Table 17. Similar results were obtained across cell lines. The Pan-Clonality (IGH/K/L) assay detects 4 rearrangements in the BDCM cell line. See Example 1 and Table 11. All four rearrangements were detected by the assay from prepared diluted samples (data not shown). In addition, each of the four rearrangements were detected linearly in cell line dilutions down to a dilution level of 1:10⁵ and two of the 4 rearrangements (IGH and IGK) were detected at a dilution level of 1:10⁶.

TABLE 17

| | | | Proportion | | | |
|---|---|---|---|---|---|---|
| | | | of | | | |
| | | Productive | Productive | | Shannon | |
| Analysis | Sample | Reads | Reads | Clones | Diversity | Evenness |
| IGH | BDCM cell | 270853 | 0.584659474 | 20714 | 14.078 | 0.9818 |
| | line_PBL_gDNA_r1 | | | | | |
| IGH | BDCM cell | 280881 | 0.582047082 | 20560 | 14.0842 | 0.983 |
| | line_PBL_gDNA_r2 | | | | | |
| IGH | BDCM cell | 331112 | 0.594597035 | 22443 | 14.1976 | 0.9823 |
| | line_PBL_gDNA_r3 | | | | | |
| IGH | BDCM cell line | 244344 | 0.583328154 | 20503 | 14.0649 | 0.9819 |
| | PBL_gDNA_r4 | | | | | |
| IGH | BDCM cell | 226216 | 0.588142327 | 19274 | 13.9777 | 0.982 |
| | line_PBL_gDNA_r5 | | | | | |
| IGH | BDCM cell | 247536 | 0.578067611 | 20609 | 14.0795 | 0.9825 |
| | line_PBL_gDNA_r6 | | | | | |
| IGH | BDCM cell | 322987 | 0.590917158 | 21399 | 14.1209 | 0.9816 |
| | line_PBL_gDNA_r7 | | | | | |
| IGH | BDCM cell | 390315 | 0.597050144 | 23446 | 14.2507 | 0.9817 |
| | line_PBL_gDNA_r8 | | | | | |
| IGKL | BDCM cell | 206742 | 0.328173124 | 9166 | 11.3775 | 0.8644 |
| | line_PBL_gDNA_r1 | | | | | |
| IGKL | BDCM cell | 214020 | 0.32020798 | 9601 | 11.4661 | 0.8667 |
| | line_PBL_gDNA_r2 | | | | | |
| IGKL | BDCM cell | 306028 | 0.332473132 | 10890 | 11.6062 | 0.8654 |
| | line_PBL_gDNA_r3 | | | | | |
| IGKL | BDCM cell | 233572 | 0.329465981 | 10090 | 11.5134 | 0.8656 |
| | line_PBL_gDNA_r4 | | | | | |
| IGKL | BDCM cell | 290676 | 0.341973699 | 11079 | 11.607 | 0.8639 |
| | line_PBL_gDNA_r5 | | | | | |
| IGKL | BDCM cell | 291667 | 0.332251739 | 10617 | 11.5381 | 0.8627 |
| | line_PBL_gDNA_r6 | | | | | |
| IGKL | BDCM cell | 277015 | 0.334880181 | 11027 | 11.6062 | 0.8643 |
| | line_PBL_gDNA_r7 | | | | | |
| IGKL | BDCM cell | 322256 | 0.333145098 | 11460 | 11.6494 | 0.8639 |
| | line_PBL_gDNA_r8 | | | | | |

### Example 4

[0309] Current NGS sequencing methods for analyzing SHM rely on multiplex primers targeting the framework 1 (FR1) or Leader regions of the IGH variable gene and joining gene primers to amplify rearranged IGH chains from gDNA templates. We have developed panels based on Ion Ampliseq technology comprising primer panels for SHM evaluation. Panels were compared using both DNA and RNA input. Performance was compared using SHM values obtained from RNA samples amplified using FR1 variable gene primers in combination with constant gene primers from the Oncomine™ BCR IGH LR Assay to determine each IGH isotype and subtype in a single PCR reaction. Comparison of SHM frequencies measured from matched RNA and DNA samples were used to determine the feasibility for use of RNA in the study of SHM, as well as comparison of the performance of Leader-J and FR1-J assays in DNA studies

[0310] The Oncomine™ BCR IGH LR Assay covers CDR1, CDR2, CDR3, and CH1 domain of the constant gene with framework 1 and isotype-specific primers (FR1-C). This design enables accurate quantitation of somatic hypermutation, clonal expansion, isotype switching and identification of clonal lineages. Constant region primers are designed against all B cell isotypes and subtypes, with input requirements ranging from 25 ng to Zug of non-FFPE RNA.

[0311] Exemplary sets of forward and reverse primers comprising SEQ ID Nos 981-988, and 1504-1540, and 1593-1740 from Tables 6, and 10-11 were designed to generate BCR IGHV Assay Designs (Leader-J/FR1-J); primers targeting leader-J and FR1-J regions in separate reactions can accurately measure clonal frequencies and/or somatic hypermutation frequencies across B cell rearrangements, with input requirement range from 200 ng to Zug of gDNA.

[0312] The IgH V gene FR1 primers of Table 11 and the IgH J gene primers of Table 6 were designed to amplify all of the currently known expressed human IgH rearrangements. A variety of primer sets for amplifying sequences from the V gene FR1 region to the J genes of IgH gDNA were generated using forward primers selected from Table 11 and reverse primers selected from Table 6.

[0313] The IgH Leader primers of Table 10 and the IgH J gene primers of Table 6 were designed to amplify all of the currently known expressed human IgH rearrangements. A variety of primer sets for amplifying sequences from the V gene leader region to the J genes of IgH gDNA were generated using forward primers selected from Table 10 and reverse primers selected from Table 6. Exemplary Leader-J primer set panels are described in Table A with each primer in the set at a 1 micromolar concentration.

TABLE A

| Leader-J Primer Set | SEQ ID NOs |
|---|---|
| 1 | 1504-1540, 981-984 |
| 2 | 1504-1540, 985-988 |
| 3 | 1504-1540, 981-988 |

[0314] For RNA experiments, RNA from human adult normal peripheral blood leukocytes (from BioChain Institute, Inc.) was reverse transcribed to cDNA with SuperScript™ IV VILO™ Master Mix (Thermo Fisher Scientific) according to manufacturer instructions.

[0315] To a single well of a 96-well PCR plate was added 10 microliters prepared cDNA or gDNA (50 ng), 4 microliters of 1 μM forward and reverse primer pool, 4 microliters of 5× Ion AmpliSeg™ HiFi Mix (Thermo Fisher Scientific), 2 microliters dNTP Mix (6.5 mM each dNTP) and 2 microliters DNase/RNase free water to bring the final reaction volume to 20 microliters. The PCR plate was sealed, reaction mixtures mixed, and loaded into a thermal cycler (e.g., Veriti™ 96-well thermal cycler (Applied Biosystems)) and run on the following temperature profile to generate the amplicon library: an initial holding stage was performed at 95° C. for 2 minutes, followed by about 32 cycles of a denaturing stage at 95° C. for 45 seconds, an annealing stage at 62° C. for 45 seconds, and an extending stage for 72° C. for 195 seconds. After cycling, a final extension 72° C. for 10 minutes was performed and the amplicon library was held at 10° C. until proceeding. Typically, about 32 cycles are used to generate the amplicon library. For some applications (eg., more or less DNA starting material, FFPE sourced DNA, quality or quantity of DNA questionable, etc), cycle number may be increased (e.g., +3).

[0316] The amplicon sample was briefly centrifuged to collect contents before proceeding. To the amplicon library (˜20 microliters), 2 microliters of FuPa reagent was added. The reaction mixture was sealed, mixed thoroughly to ensure uniformity and incubated at 50° C. for 10 minutes, 55° C. for 10 minutes, 60° C. for 20 minutes, then held at 10° C. for up to 1 hour. The sample was briefly centrifuged to collect contents before proceeding to a ligation step. The reaction mixture now containing the phosphorylated amplicon library was combined with 2 microliters of Ion Torrent™ Dual Barcode Adapters (Thermo Fisher Scientific), 4 microliters of AmpliSeq Plus Switch Solution (sold as a component of the Ion AmpliSeg™ Library Kit Plus, Thermo Fisher Scientific) and 2 microliters of DNA ligase, added last (sold as a component of the Ion AmpliSeg™ Library Kit Plus, Thermo Fisher Scientific), then incubated at the following: 22° C. for 30 minutes, 68° C. for 5 minutes, 72° C. for 5 minutes, then held at 10° C. for up to 1 hour. The sample was briefly centrifuged to collect contents before proceeding to a library purification step.

[0317] After the ligation step incubation, 24 microliters (0.8× sample volume) of room temperature AMPure® XP beads (Beckman Coulter) was added to ligated DNA and the mixture was pipetted thoroughly to mix the bead suspension with the DNA. The mixture was incubated at room temperature for 5 minutes, placed on a magnetic rack such as a DynaMag™-96 side magnet (Invitrogen, Part No. 12331D) for two minutes. After the solution had cleared, the supernatant was discarded. Without removing the plate from the magnetic rack, 150 microliters of freshly prepared 70% ethanol was introduced into the sample, and incubated while gently rotating the tube on the magnetic rack. After the solution cleared, the supernatant was discarded without disturbing the pellet. A second ethanol wash was performed, the supernatant discarded, and any remaining ethanol was removed by pulse-spinning the tube and carefully removing residual ethanol while not disturbing the pellet. The pellet was air-dried for about 5 minutes at room temperature.

[0318] The ligated DNA was amplified by elution of the ligated DNA by suspension in 50 microliters library amp mix and 2 microliters 25× Library Amp Primers and removal of magnetic beads, followed by amplification. An initial holding stage was performed at 98° C. for 2 minutes, followed by about 7 cycles of a denaturing stage at 98° C. for 15 seconds, an annealing/extending stage at 64° C. for 60 seconds. After cycling, the amplicon library was held at 10° C. until proceeding. Typically, about 7 cycles are used to generate the amplicon library. For some applications, cycle number may be reduced (e.g., −2 cycles) or increased (e.g., +2 cycles).

[0319] After the amplification step, 30 microliters (0.6× sample volume) of room temperature AMPure® XP beads (Beckman Coulter) was added to ligated DNA and the mixture was pipetted thoroughly to mix the bead suspension with the DNA. The mixture was incubated at room temperature for 5 minutes, placed on a magnetic rack such as a DynaMag™-96 side magnet (Invitrogen, Part No. 12331D) for two minutes. After the solution had cleared, the supernatant was discarded. Without removing the plate from the magnetic rack, 150 microliters of freshly prepared 70% ethanol was introduced into the sample, and incubated while gently rotating the tube on the magnetic rack. After the solution cleared, the supernatant was discarded without disturbing the pellet. A second ethanol wash was performed, the supernatant discarded, and any remaining ethanol was removed by pulse-spinning the tube and carefully removing residual ethanol while not disturbing the pellet. The pellet was air-dried for about 5 minutes at room temperature.

[0320] The amplified DNA was eluted from the beads in 50 microliters of low TE buffer and another purification carried out. Purified library was eluted from the beads in 50 microliters of low TE buffer.

[0321] The eluted libraries were quantitated by qPCR using the Ion Library TaqMan® Quantitation Kit (Ion Torrent, Cat. No. 4468802), according to manufacturer instructions. After quantification, the libraries were diluted to a concentration of about 25 pM.

[0322] The libraries were normalized to 25 pM and aliquots of the final libraries were used in template preparation and chip loading using the Ion Chef™ instrument according to the manufacturer instructions. Sequencing was performed using Ion 540™ chips on the Ion GeneStudio™ System according to manufacturer instructions, and gene sequence analysis was performed with the Ion Torrent Suite™ software. Since the sequences were generated from use of J gene primers, they were subjected to a J gene sequence inference process involving adding the inferred J gene sequence to the sequence read to create an extended sequence read, aligning the extended sequence read to a reference sequence, and identifying productive reads, as described herein. In addition, the generated sequence data was further subjected to the error identification and removal programs provided herein.

[0323] Oncomine™ BCR-IGH LR libraries were prepared using plasmid constructs containing full length IGH chains cloned from germline and CLL research samples that were spiked into PBL total RNA background. These libraries were sequenced using the Ion™ GeneStudio S5 530 chip and analyzed using the Ion Reporter to evaluate the ability to quantify somatic hypermutation, identify isotype, clonal structure of germline and CLL research samples. Measured and known SHM frequency were using control plasmids. V-gene SHM frequencies for constructs were calculated over entire V-gene (including leader sequence).

[0324] Table 18 indicates observed SHM levels measured using Oncomine™ BCR-IGH LR Assay is comparable to known SHM frequencies from known CLL sequences which were designed into synthetic plasmid controls.

TABLE 18
Qualifying SHM in Germline and CLL Research Samples

| | | Expected | | | Observed | | | |
|---|---|---|---|---|---|---|---|---|
| | | V-Gene | | | V-Gene | | | |
| Research Sample | | SHM | | Clonal | SHM | | Clonal | |
| Accession | Status | Frequency | Isotype | Structure | Frequency | Isotype | Structure | Status |
| JX432218.1 | Mutated | 0.037 | IgA1 | Monoclonal | 0.048 | IgA1 | Monoclonal | PASS |
| AF021966.1 | Mutated | 0.088 | IgG2 | Monoclonal | 0.102 | IgG2 | Monoclonal | PASS |
| AF021964.1 | Mutated | 0.084 | IgG1 | Monoclonal | 0.088 | IgG1 | Monoclonal | PASS |
| JX432219.1 | Mutated | 0.058 | IgA2 | Monoclonal | 0.057 | IgA2 | Monoclonal | PASS |
| JX432222.1 | Germline | 0 | IgG3 | Monoclonal | 0 | IgG3 | Monoclonal | PASS |
| AF021958.1 | Germline | 0 | IgM | Monoclonal | 0 | IgM | Monoclonal | PASS |
| AF021967.1 | Germline | 0 | IgD | Monoclonal | 0 | IgD | Monoclonal | PASS |

[0325] Oncomine™ BCR-IGH LR SHM values were compared to those obtained by Sanger sequencing using IGH-Leader or FR1 and joining gene primer sets. High concordance between BCR IGH-LR assay with sanger sequencing was found when comparing the IGHV SHM frequencies. (IGHV SHM Spearman Concordance Value=0.849, data not shown).

[0326] Libraries were prepared using the Oncomine™ BCR IGH-LR Assay from total RNA extracted from peripheral blood spiked with lymphoma cell line total RNA to a frequency of 10E-2 by mass ratio; and libraries were also prepared using the IGHV SHM Leader-J and FR1-J assays from genomic DNA extracted from peripheral blood spiked with lymphoma cell line genomic DNA to a frequency of 10E-2 by mass ratio. Libraries were sequenced via the Ion GeneStudio™ S5 System, followed by Ion Reporter analysis to identify clonotypes and evaluate B cell clone frequencies.

TABLE 19
Correlation between Ion Oncomine ™ BCR IGH LR Assay and IGHV SHM Leader-J and FR1-J Assays

| | SHM | | | SHM | SHM | SHM | SHM |
|---|---|---|---|---|---|---|---|
| | Frequency | SHM | SHM | Frequency | Frequency | Frequency | Frequency |
| | measured by | Frequency | Frequency | measured by | measured by | measured by | measured by |
| | BCR Pan- | measured by | measured by | Leader-J | Leader-J | FR1-J | FR1-J |
| Cell Line | Clonality | IGH-LR (1) | IGH-LR (2) | Assay (1) | Assay (2) | Assay (1) | Assay (2) |
| MM.1R | 0 | — | — | 1.7 | 1.7 | 2.2 | 2.2 |
| (CRL-2975) | | | | | | | |
| JVM2 | 0 | 0.8 | 0.9 | 0.7 | 0.7 | 0.9 | 0.9 |
| BDCM | 2.2 | 5.7 | 5.7 | 5.1 | 5.4 | 5.7 | 5.7 |
| Pfeiffer | 5 | 2.2 | 2.2 | 1.7 | 1.7 | 2.2 | 2.2 |
| GA-10 | 8.3 | — | — | 6.1 | 6.1 | — | — |
| TMM | 15 | 9.1 | 9.1 | 7.4 | 7.4 | 9.1 | 9.1 |

[0327] Both RNA and DNA input assay workflows were able to correctly determine the SHM status of all rearrangements tested. IGHV SHM values were highly concordant between both RNA and DNA approaches. SHM values derived from FR1 targeting variable gene primers delivered concordant results compared to leader targeting variable gene primers when using DNA input across a wide range of SHM frequencies tested. See Table 19.

[0328] Clone frequencies were obtained from the Ion Reporter clone summary analysis and high concordance was observed for 5 research sample values when correlated between BCR-IGH LR and IGHV Leader J and FR1-J approaches. See Table 20.

TABLE 20
Clone Frequencies

| | IGH-BCR-LR | IGHV Leader-J | IGHV FR1-J |
|---|---|---|---|
| IGH-BCR-LR | 1.0000 | 0.8101 | 0.9495 |
| IGHV Leader-J | 0.8101 | 1.0000 | 0.8201 |
| IGHV FR1-J | 0.9495 | 0.8201 | 1.0000 |

[0329] High concordance was observed when comparing SHM frequency values for 5 selected research cell lines that are correlated with a RA2 value of greater than 0.9 in comparison to the values derived from the IGH BCR-LR assay (data not shown).

[0330] These results support the ability of highly multiplexed long-read NGS assays to accurately quantify SHM in either DNA or RNA samples. Concordant results were shown between FR1 and Leader targeting primers using DNA input show the utility in both priming locations. RNA based NGS methods benefit from lower sample requirements as well as the addition of isotype (and subtype) identification, opening new research areas for study of the B cell immune repertoire.

### Example 5

[0331] After testing with cell lines in as described above, we carried out similar analytics using extracts from CLL (chronic lymphocytic leukemia) clinical research samples obtained from Cureline, determined by the IGH-LR (RNA), FR1-J (DNA), and Leader-J (DNA) assays. Libraries were prepared and analysis carried out as described in the previous example, using the Oncomine™ BCR IGH-LR Assay from total RNA extracted from clinical samples; and libraries were also prepared using the IGHV SHM Leader-J and FR1-J assays from genomic DNA extracted from the samples. Libraries were sequenced via the Ion GeneStudio™ S5 System, and comparison of SHM frequency in CLL research samples.

[0332] Our expectation was there would be lower somatic hypermutation SHM rates for Leader-J assay due to longer overall amplicon length. However, results from SHM assays are in agreement. See Table 21

[0333] Results support the ability of highly multiplexed long-read NGS assays to accurately quantify SHM in either DNA or RNA samples, in contrived samples and clinical samples. RNA based NGS methods benefit from lower sample requirements as well as the addition of isotype (and subtype) identification, opening new research areas for study of the B cell immune repertoire.

TABLE 21
Correlation between Ion Oncomine ™ BCR IGH LR Assay and IGHV SHM Leader-J and FR1-J Assays using clinical samples

| | | | | SHM | SHM | SHM | SHM |
|---|---|---|---|---|---|---|---|
| | | SHM | SHM | Frequency | Frequency | Frequency | Frequency |
| | | Frequency | Frequency | measured by | measured by | measured by | measured by |
| | | measured by | measured by | Leader-J | Leader-J | FR1-J | FR1-J |
| Sample | Cureline Clinical Samples | IGH-LR (1) | IGH-LR (2) | Assay (1) | Assay (2) | Assay (1) | Assay (2) |
| 1 | CLL-16-507/1215 PBMC | 10.40% | 10.40% | 8.10% | 8.10% | 10.40% | 10.40% |
| 2 | CLL-16-628/0318 PBMC | 0% | 0% | 0% | 0% | 0% | 0% |
| 3 | CLL-11-011 PBMC | 8% | 8% | — | — | 8% | 8% |
| 4 | CCL-11-010 PBMC | — | — | 0% | 0% | 0% | 0% |
| 5 | CLL-108/06 PBMC | 0% | 0% | 0% | 0% | 0% | 0% |
| 6 | CLL-17-577/0217 PBMC | 0.40% | 0.40% | 0.30% | 0.30% | 0.40% | 0.40% |
| | CLL-17-577/0217 BMMC | 0.40% | 0.40% | 0.30% | 0.30% | 0.40% | 0.40% |
| 7 | 16_5021115_2733930_CLL | 3.9%; 4%, 3.8% | 3.9%; 4%, 3.8% | 3.10% | 3.10% | 3.9%; 3.8%, 4% | 3.9%; 3.8%, 4% |
| | PBMC | | | | | | |
| | 16_5021115_2733930_CLL | 3.9%; 4%, 3.8% | 3.9%; 4%, 3.8% | 3.10% | 3.10% | 3.9%; 3.8%, 4% | 3.9%; 3.8%, 4% |
| | BMA | | | | | | |
| | 16_5021115_2733930_CLL | 3.9%; 4%, 3.8% | 3.9%; 4%, 3.8% | 3.10% | 3.10% | 3.9%; 3.8%, 4% | 3.9%; 3.8%, 4% |
| | BMMC | | | | | | |
| 8 | 16_5100116_2733930_CLL | 7.4%; 7.3% | 7.4%; 7.3% | 6.40% | 6.40% | 7.70% | 7.70% |
| | PBMC | | | | | | |
| | 16_5100116_2733930_CLL | 7.4%; 7.3% | 7.4%; 7.3% | 6.40% | 6.40% | 7.70% | 7.70% |
| | BMA | | | | | | |
| | 16_5100116_2733930_CLL | 7.4%; 7.3% | 7.4%; 7.3% | 6.40% | 6.40% | 7.70% | 7.70% |
| | BMMC | | | | | | |
| 9 | 16_6290318_2733930_CLL | 0% | 0% | 0% | 0% | 0% | 0% |
| | PBMC | | | | | | |
| 10 | 16_5681116_2733930_CLL | 0% | 0% | 0% | 0% | 0% | 0% |
| | PBMC | | | | | | |

### Example 6

[0334] A recent publication (Ho, et al. doi.org/10.1016/j.jmoldx.2020.10.015) testing clonality detection in 438 MM samples from 251 individuals using a combination of the Invivoscribe IGH FR3-, FR2-, FR1-, Leader-J Assays, as well as IGK Assay found 93% positive detection (235/251). When we compare clonality detection using the assays provided herein, total positive detection achieved similar or higher levels using a simpler, streamlined assay approach.

TABLE 22
Summary of clonality detection

| | Total | Total positive | Total positive | Total positive |
|---|---|---|---|---|
| Samples | Tested | (IGH) [%] | (IGL) [%] | (IGH + IGL) [%] |
| Cell Lines | 27 | 13 | 22 | 25 |
| | | [48%] | [81%] | [93%] |
| Clinical Research Samples | 20 | 11 | 19 | 19 |
| (MM, CLL, B-ALL, DLBCL) | | [55%] | [95%] | [95%] |

### REFERENCES

[0335] [1] Tan, K., Ding, L., Sun, Q. et al. BMC Cancer 18, 940 (2018).-doi.org/10.1186/s12885-018-4840-5
[0336] [2] D Benjamin, et al. J Immunol 1982; 129:1336-1342
[0337] [3] van Boxel J A, Buell D N. Nature. 1974; 251(5474):443-444.
[0338] [4] web.expasy.org/cellosaurus/CVCL_8794
[0339] [5] web.expasy.org/cellosaurus/CVCL_5278
[0340] [6] web.expasy.org/cellosaurus/CVCL_0012; Pegoraro L, Malavasi F, Bellone G, et al. Blood. 1989; 73(4):1020-1027.
[0341] [7] www.atcc.org/Products/All/CRL-2261.aspx #characteristics
[0342] [8] SU-DHL-6 possesses a t(14;18)(q32;q21) translocation and demonstrates an unexpected recombination within its heavy chain gene locus that may be the interchromosomal breakpoint.
[0343] [9] Huet, R., et al. Leukemia (2020) 34: 2257-2259
[0344] [10] Davi, F., et al. Leukemia (2020), 34: 2545-2551
[0345] [11] Ho, et al. doi.org/10.1016/j.jmoldx.2020.10.015

What is claimed is:

1. A method for amplification of rearranged genomic DNA (gDNA) sequences of a B cell receptor (BCR) repertoire in a sample, comprising:
performing a single multiplex amplification reaction to amplify expressed target BCR nucleic acid template molecules using each of a set of:
i) (a) a plurality of V gene primers directed to a majority of different V genes of BCR IgH coding sequence comprising at least a portion of framework region 3 (FR3) within the V gene,
(b) a plurality of J gene primers directed to at least a portion of a majority of different J genes of the BCR IgH coding sequence; and
ii) (a) a plurality of V gene primers directed to a majority of different V genes of BCR IgLlambda coding sequence comprising at least a portion of framework region 3 (FR3) within the V gene,
(b) a plurality of J gene primers directed to at least a portion of a majority of different J genes of the BCR IgLlambda coding sequence; and
iii) (a) a plurality of V gene primers directed to a majority of different V genes of BCR IgLkappa coding sequence comprising at least a portion of framework region 1 (FR3) within the V gene,
(b) a plurality of J gene primers directed to at least a portion of a majority of different J genes of the BCR IgLkappa coding sequence; and optionally
iv) (a) one or more gene primers directed to a IgLkappa Cintron sequence, and
(b) one or more gene primers directed to a KDE sequence;
wherein each set of i) and ii) and iii) primers is directed to coding sequences of the same target BCR gene selected from an IgH, IgLlambda, and IgLkappa gene, respectively, and wherein performing the amplification using the set of i) and ii) and iii) primers results in amplicon molecules representing the target BCR repertoire in the sample;
thereby generating target BCR amplicon molecules comprising the expressed target BCR repertoire.

2. The method of claim 1, wherein each of the plurality primers has any one or more of the following criteria:
(1) includes two or more modified nucleotides within the primer, at least one of which is included near or at the termini of the primer and at least one of which is included at, or about the center nucleotide position of the primer;
(2) length is about 15 to about 40 bases in length;
(3) Tₘ of from above 60° C. to about 70° C.;
(4) has low cross-reactivity with non-target sequences present in the sample;
(5) at least the first four nucleotides (going from 3′ to 5′ direction) are non-complementary to any sequence within any other primer present in the same reaction; and
(6) are non-complementary to any consecutive stretch of at least 5 nucleotides within any other produced target amplicon.

3. The method of claim 1, wherein each of the plurality of primers includes one or more cleavable groups, preferably located (i) near or at the termini of the primer or (ii) near or about the center nucleotide of the primer.

4. The method of claim 1, wherein each of the plurality primer includes two or more modified nucleotides having a cleavable group selected from a methylguanine, 8-oxo-guanine, xanthine, hypoxanthine, 5,6-dihydrouracil, uracil, 5-methylcytosine, thymine-dimer, 7-methylguanosine, 8-oxo-deoxyguanosine, xanthosine, inosine, dihydrouridine, bromodeoxyuridine, uridine or 5-methylcytidine.

5. The method of claim 1, wherein the set of primers includes (a) one or more gene primers directed to a IgLkappa Cintron sequence, and (b) one or more gene primers directed to a KDE sequence.

6. The method of claim 1, wherein the plurality of V primers anneal to at least a portion of the FR3 portion of the template molecules, and wherein the one or more J gene primers comprises at least five primers that anneal to at least a portion of the J gene portion of the template molecules.

7. The method of claim 1, wherein the generated target BCR amplicon molecules include complementarity determining region CDR3 of the target BCR gene sequence.

8. The method of claim 1, wherein the at least one set of i) and ii) and iii) and iv) is selected from primers of Tables 9 and 6, Tables 1 and 2, Tables 3 and 4, and Table 5, respectively.

9. A method for screening for a biomarker for a disease or condition in a subject, comprising:
performing a single multiplex amplification reaction to amplify target BCR nucleic acid template molecules from a sample from the subject according to claim 1;
performing sequencing of the target BCR amplicon molecules and determining the sequence of the molecules, wherein determining the sequence includes obtaining initial sequence reads, aligning the initial sequence read to a reference sequence, identifying productive reads, and correcting one or more indel errors to generate rescued productive sequence reads;
identifying BCR repertoire clonal populations from the determined target BCR sequences; and
identifying the sequence of at least one BCR clone for use as a biomarker for the disease or condition in the subject.

10. The method of claim 9, wherein the disease or condition is selected from cancer, autoimmune disease, infectious disease, allergy, response to vaccination, and response to an immunotherapy treatment.

11. The method of claim 9, wherein the target BCR gene is IgH, IgLlambda or IgLkappa.

12. The method of claim 9, wherein the sample comprises hematopoietic cells, lymphocytes, tumor cells, or cell-free DNA (cfDNA).

13. The method of claim 9, wherein the sample is selected from the group consisting of peripheral blood mononuclear cells (PBMCs), B cells, circulating tumor cells, and tumor infiltrating lymphocytes.

14. The method of claim 9, wherein the sample is formalin-fixed paraffin-embedded (FFPE) tissue, fresh tissue, frozen tissue, a blood sample, or a plasma sample

15. A composition for analysis of a B cell receptor (BCR) repertoire in a sample, comprising at least one set of:
i) (a) a plurality of V gene primers directed to a majority of different V genes of BCR IgH coding sequence comprising at least a portion of framework region 3 (FR3) within the V gene,
(b) a plurality of J gene primers directed to at least a portion of a majority of different J genes of the BCR IgH coding sequence; and
ii) (a) a plurality of V gene primers directed to a majority of different V genes of BCR IgLlambda coding sequence comprising at least a portion of framework region 3 (FR3) within the V gene,
(b) a plurality of J gene primers directed to at least a portion of a majority of different J genes of the BCR IgLlambda coding sequence; and
iii) (a) a plurality of V gene primers directed to a majority of different V genes of BCR IgLkappa coding sequence comprising at least a portion of framework region 1 (FR3) within the V gene,
(b) a plurality of J gene primers directed to at least a portion of a majority of different J genes of the BCR IgLkappa coding sequence; and optionally
iv) (a) one or more gene primers directed to a IgLkappa Cintron sequence, and
(b) one or more gene primers directed to a KDE sequence;
wherein each set of i) and ii) and iii) primers is directed to coding sequences of the same target BCR gene selected from an IgH, IgLlambda, and IgLkappa gene, respectively, and wherein performing the amplification using the set of i) and ii) and iii) primers results in amplicon molecules representing the target BCR repertoire in the sample.

16. The composition of claim 15, wherein each of the plurality primers has any one or more of the following criteria:
(1) includes two or more modified nucleotides within the primer, at least one of which is included near or at the termini of the primer and at least one of which is included at, or about the center nucleotide position of the primer;
(2) length is about 15 to about 40 bases in length;
(3) Tₘ of from above 60° C. to about 70° C.;
(4) has low cross-reactivity with non-target sequences present in the sample;
(5) at least the first four nucleotides (going from 3′ to 5′ direction) are non-complementary to any sequence within any other primer present in the same reaction; and
(6) are non-complementary to any consecutive stretch of at least 5 nucleotides within any other produced target amplicon.

17. The composition of claim 15, wherein each of the primers includes one or more cleavable groups located (i) near or at the termini of the primer or (ii) near or about the center nucleotide of the primer.

18. The composition of claim 15, wherein each of the plurality primers includes two or more modified nucleotides having a cleavable group selected from a methylguanine, 8-oxo-guanine, xanthine, hypoxanthine, 5,6-dihydrouracil, uracil, 5-methylcytosine, thymine-dimer, 7-methylguanosine, 8-oxo-deoxyguanosine, xanthosine, inosine, dihydrouridine, bromodeoxyuridine, uridine or 5-methylcytidine.

19. The composition of claim 15, wherein the set of primers comprises (a) one or more gene primers directed to a IgLkappa Cintron sequence, and (b) one or more gene primers directed to a KDE sequence.

20. The composition of claim 15, wherein the at least one set of i) and ii) and iii) and iv) is selected from primers of Tables 9 and 6, Tables 1 and 2, Tables 3 and 4, and Table 5, respectively.

The application's sequence listing, which the Patent Office published only in electronic form, follows.

SEQUENCE LISTING (1838 sequences)

SEQ ID NO: 1 - DNA, 19 bp, synthetic construct
  misc_feature 1..19: note = synthetic sequence
  source 1..19: mol_type = other DNA
atctctgggctccaggctg

SEQ ID NO: 2 - DNA, 19 bp, synthetic construct
  misc_feature 1..19: note = synthetic sequence
  source 1..19: mol_type = other DNA
atctctgggctctagtctg

SEQ ID NO: 3 - DNA, 19 bp, synthetic construct
  misc_feature 1..19: note = synthetic sequence
  source 1..19: mol_type = other DNA
attactggactccagcctg

SEQ ID NO: 4 - DNA, 19 bp, synthetic construct
  misc_feature 1..19: note = synthetic sequence
  source 1..19: mol_type = other DNA
ctgtcaggtgtgcagcctg

SEQ ID NO: 5 - DNA, 19 bp, synthetic construct
  misc_feature 1..19: note = synthetic sequence
  source 1..19: mol_type = other DNA
atctccaacctccagttag

SEQ ID NO: 6 - DNA, 19 bp, synthetic construct
  misc_feature 1..19: note = synthetic sequence
  source 1..19: mol_type = other DNA
atctctgggctccagcctg

SEQ ID NO: 7 - DNA, 19 bp, synthetic construct
  misc_feature 1..19: note = synthetic sequence
  source 1..19: mol_type = other DNA
atctctgggctccagtctg

SEQ ID NO: 8 - DNA, 19 bp, synthetic construct
  misc_feature 1..19: note = synthetic sequence
  source 1..19: mol_type = other DNA
atcagcagggctcagactg

SEQ ID NO: 9 - DNA, 19 bp, synthetic construct
  misc_feature 1..19: note = synthetic sequence
  source 1..19: mol_type = other DNA
cttttgggtgcgcagcctg

SEQ ID NO: 10 - DNA, 19 bp, synthetic construct
  misc_feature 1..19: note = synthetic sequence
  source 1..19: mol_type = other DNA
atcactggactccagtctg

SEQ ID NO: 11 - DNA, 19 bp, synthetic construct
  misc_feature 1..19: note = synthetic sequence
  source 1..19: mol_type = other DNA
atcagtgggctccagtctg

SEQ ID NO: 12 - DNA, 19 bp, synthetic construct
  misc_feature 1..19: note = synthetic sequence
  source 1..19: mol_type = other DNA
atcactggggcccaggctg

SEQ ID NO: 13 - DNA, 19 bp, synthetic construct
  misc_feature 1..19: note = synthetic sequence
  source 1..19: mol_type = other DNA
atctccaacctccagtctg

SEQ ID NO: 14 - DNA, 19 bp, synthetic construct
  misc_feature 1..19: note = synthetic sequence
  source 1..19: mol_type = other DNA
acctctgggctccaggctg

SEQ ID NO: 15 - DNA, 19 bp, synthetic construct
  misc_feature 1..19: note = synthetic sequence
  source 1..19: mol_type = other DNA
ctttcgggtgcgcagcctg

SEQ ID NO: 16 - DNA, 19 bp, synthetic construct
  misc_feature 1..19: note = synthetic sequence
  source 1..19: mol_type = other DNA
atctctggactccaggctg

SEQ ID NO: 17 - DNA, 19 bp, synthetic construct
  misc_feature 1..19: note = synthetic sequence
  source 1..19: mol_type = other DNA
atctccgggctccagtctg

SEQ ID NO: 18 - DNA, 19 bp, synthetic construct
  misc_feature 1..19: note = synthetic sequence
  source 1..19: mol_type = other DNA
atcactgggctccaggctg

SEQ ID NO: 19 - DNA, 19 bp, synthetic construct
  misc_feature 1..19: note = synthetic sequence
  source 1..19: mol_type = other DNA
atctccaacctccagtttg

SEQ ID NO: 20 - DNA, 19 bp, synthetic construct
  misc_feature 1..19: note = synthetic sequence
  source 1..19: mol_type = other DNA
atctcgggcctctagcctg

SEQ ID NO: 21 - DNA, 19 bp, synthetic construct
  misc_feature 1..19: note = synthetic sequence
  source 1..19: mol_type = other DNA
atcatcagggctcagactg

SEQ ID NO: 22 - DNA, 19 bp, synthetic construct
  misc_feature 1..19: note = synthetic sequence
  source 1..19: mol_type = other DNA
atctccagcctccagtctg

SEQ ID NO: 23 - DNA, 19 bp, synthetic construct
  misc_feature 1..19: note = synthetic sequence
  source 1..19: mol_type = other DNA
gtctctgggctccaggctg

SEQ ID NO: 24 - DNA, 19 bp, synthetic construct
  misc_feature 1..19: note = synthetic sequence
  source 1..19: mol_type = other DNA
atcagtgggctccggtccg

SEQ ID NO: 25 - DNA, 21 bp, synthetic construct
  misc_feature 1..21: note = synthetic sequence
  source 1..21: mol_type = other DNA
ccatcagcagggtcctgaccg

SEQ ID NO: 26 - DNA, 21 bp, synthetic construct
  misc_feature 1..21: note = synthetic sequence
  source 1..21: mol_type = other DNA
ccatcagtggagtccaggcag

SEQ ID NO: 27 - DNA, 21 bp, synthetic construct
  misc_feature 1..21: note = synthetic sequence
  source 1..21: mol_type = other DNA
ccatcagcaggatcgaggctg

SEQ ID NO: 28 - DNA, 21 bp, synthetic construct
  misc_feature 1..21: note = synthetic sequence
  source 1..21: mol_type = other DNA
tcatttctacaatcccgtctg

SEQ ID NO: 29 - DNA, 21 bp, synthetic construct
  misc_feature 1..21: note = synthetic sequence
  source 1..21: mol_type = other DNA
ccatcactggggctcaggcgg

SEQ ID NO: 30 - DNA, 21 bp, synthetic construct
  misc_feature 1..21: note = synthetic sequence
  source 1..21: mol_type = other DNA
tcatctctgggctccagcctg

SEQ ID NO: 31 - DNA, 21 bp, synthetic construct
  misc_feature 1..21: note = synthetic sequence
  source 1..21: mol_type = other DNA
ccatcactgggattcaggttg

SEQ ID NO: 32 - DNA, 21 bp, synthetic construct
  misc_feature 1..21: note = synthetic sequence
  source 1..21: mol_type = other DNA
ccattagcagggtcctgacca

SEQ ID NO: 33 - DNA, 21 bp, synthetic construct
  misc_feature 1..21: note = synthetic sequence
  source 1..21: mol_type = other DNA
ccatcagcggggcccaggttg

SEQ ID NO: 34 - DNA, 21 bp, synthetic construct
  misc_feature 1..21: note = synthetic sequence
  source 1..21: mol_type = other DNA
ccatcagcagggtcgaagccg

SEQ ID NO: 35 - DNA, 21 bp, synthetic construct
  misc_feature 1..21: note = synthetic sequence
  source 1..21: mol_type = other DNA
ccatctctggcctccagacca

SEQ ID NO: 36 - DNA, 21 bp, synthetic construct
  misc_feature 1..21: note = synthetic sequence
  source 1..21: mol_type = other DNA
ccatcacgggggcccaggcag

SEQ ID NO: 37 - DNA, 21 bp, synthetic construct
  misc_feature 1..21: note = synthetic sequence
  source 1..21: mol_type = other DNA
gcatcaccggactccagactg

SEQ ID NO: 38 - DNA, 21 bp, synthetic construct
  misc_feature 1..21: note = synthetic sequence
  source 1..21: mol_type = other DNA
ccatcagtggagcccaggctg

SEQ ID NO: 39 - DNA, 21 bp, synthetic construct
  misc_feature 1..21: note = synthetic sequence
  source 1..21: mol_type = other DNA
gcatctctgagctgcagcctg

SEQ ID NO: 40 - DNA, 21 bp, synthetic construct
  misc_feature 1..21: note = synthetic sequence
  source 1..21: mol_type = other DNA
ccatcactggggctcaggttg

SEQ ID NO: 41 - DNA, 21 bp, synthetic construct
  misc_feature 1..21: note = synthetic sequence
  source 1..21: mol_type = other DNA
ccatctctggactgaagactg

SEQ ID NO: 42 - DNA, 21 bp, synthetic construct
  misc_feature 1..21: note = synthetic sequence
  source 1..21: mol_type = other DNA
ctatcagtggggcccaggtgg

SEQ ID NO: 43 - DNA, 21 bp, synthetic construct
  misc_feature 1..21: note = synthetic sequence
  source 1..21: mol_type = other DNA
ccatcaagaacatccaggaag

SEQ ID NO: 44 - DNA, 21 bp, synthetic construct
  misc_feature 1..21: note = synthetic sequence
  source 1..21: mol_type = other DNA
ccatcagcagagcccaagccg

SEQ ID NO: 45 - DNA, 21 bp, synthetic construct
  misc_feature 1..21: note = synthetic sequence
  source 1..21: mol_type = other DNA
ccatctctgggctcaagtccg

SEQ ID NO: 46 - DNA, 21 bp, synthetic construct
  misc_feature 1..21: note = synthetic sequence
  source 1..21: mol_type = other DNA
gcaccactgggctctgggctg

SEQ ID NO: 47 - DNA, 21 bp, synthetic construct
  misc_feature 1..21: note = synthetic sequence
  source 1..21: mol_type = other DNA
gcatcactggcctctggcctg

SEQ ID NO: 48 - DNA, 21 bp, synthetic construct
  misc_feature 1..21: note = synthetic sequence
  source 1..21: mol_type = other DNA
ccatcagcgggacccaggcta

SEQ ID NO: 49 - DNA, 21 bp, synthetic construct
  misc_feature 1..21: note = synthetic sequence
  source 1..21: mol_type = other DNA
ccatcagtggggcccaggtgg

SEQ ID NO: 50 - DNA, 21 bp, synthetic construct
  misc_feature 1..21: note = synthetic sequence
  source 1..21: mol_type = other DNA
ccttctccaacctccagtctg

SEQ ID NO: 51 - DNA, 21 bp, synthetic construct
  misc_feature 1..21: note = synthetic sequence
  source 1..21: mol_type = other DNA
ctgataatcaatgggccccag

SEQ ID NO: 52 - DNA, 20 bp, synthetic construct
  misc_feature 1..20: note = synthetic sequence
  source 1..20: mol_type = other DNA
tgaccattagtggggcccag

SEQ ID NO: 53 - DNA, 21 bp, synthetic construct
  misc_feature 1..21: note = synthetic sequence
  source 1..21: mol_type = other DNA
ctgaccattagtggggcccag

SEQ ID NO: 54 - DNA, 19 bp, synthetic construct
  misc_feature 1..19: note = synthetic sequence
  source 1..19: mol_type = other DNA
ggccatcaacagggcccag

SEQ ID NO: 55 - DNA, 22 bp, synthetic construct
  misc_feature 1..22: note = synthetic sequence
  source 1..22: mol_type = other DNA
ctgcacatttctgagcagcctg

SEQ ID NO: 56 - DNA, 21 bp, synthetic construct
  misc_feature 1..21: note = synthetic sequence
  source 1..21: mol_type = other DNA
ttgattattaatggggcacag

SEQ ID NO: 57 - DNA, 22 bp, synthetic construct
  misc_feature 1..22: note = synthetic sequence
  source 1..22: mol_type = other DNA
ttgattattaatgggggcacag

SEQ ID NO: 58 - DNA, 20 bp, synthetic construct
  misc_feature 1..20: note = synthetic sequence
  source 1..20: mol_type = other DNA
ctcttgggtgtgcagcccga

SEQ ID NO: 59 - DNA, 19 bp, synthetic construct
  misc_feature 1..19: note = synthetic sequence
  modified_base 11: mod_base = OTHER; note = uracil
  modified_base 18: mod_base = OTHER; note = uracil
  source 1..19: mol_type = other DNA
atctctgggctccaggctg

SEQ ID NO: 60 - DNA, 19 bp, synthetic construct
  misc_feature 1..19: note = synthetic sequence
  modified_base 11: mod_base = OTHER; note = uracil
  modified_base 18: mod_base = OTHER; note = uracil
  source 1..19: mol_type = other DNA
atctctgggctctagtctg

SEQ ID NO: 61 - DNA, 19 bp, synthetic construct
  misc_feature 1..19: note = synthetic sequence
  modified_base 11: mod_base = OTHER; note = uracil
  modified_base 18: mod_base = OTHER; note = uracil
  source 1..19: mol_type = other DNA
attactggactccagcctg

SEQ ID NO: 62 - DNA, 19 bp, synthetic construct
  misc_feature 1..19: note = synthetic sequence
  modified_base 9: mod_base = OTHER; note = uracil
  modified_base 18: mod_base = OTHER; note = uracil
  source 1..19: mol_type = other DNA
ctgtcaggtgtgcagcctg

SEQ ID NO: 63 - DNA, 19 bp, synthetic construct
  misc_feature 1..19: note = synthetic sequence
  modified_base 11: mod_base = OTHER; note = uracil
  modified_base 17: mod_base = OTHER; note = uracil
  source 1..19: mol_type = other DNA
atctccaacctccagttag

SEQ ID NO: 64 - DNA, 19 bp, synthetic construct
  misc_feature 1..19: note = synthetic sequence
  modified_base 11: mod_base = OTHER; note = uracil
  modified_base 18: mod_base = OTHER; note = uracil
  source 1..19: mol_type = other DNA
atctctgggctccagcctg

SEQ ID NO: 65 - DNA, 19 bp, synthetic construct
  misc_feature 1..19: note = synthetic sequence
  modified_base 11: mod_base = OTHER; note = uracil
  modified_base 18: mod_base = OTHER; note = uracil
  source 1..19: mol_type = other DNA
atctctgggctccagtctg

SEQ ID NO: 66 - DNA, 19 bp, synthetic construct
  misc_feature 1..19: note = synthetic sequence
  modified_base 12: mod_base = OTHER; note = uracil
  modified_base 18: mod_base = OTHER; note = uracil
  source 1..19: mol_type = other DNA
atcagcagggctcagactg

SEQ ID NO: 67 - DNA, 19 bp, synthetic construct
  misc_feature 1..19: note = synthetic sequence
  modified_base 9: mod_base = OTHER; note = uracil
  modified_base 18: mod_base = OTHER; note = uracil
  source 1..19: mol_type = other DNA
cttttgggtgcgcagcctg

SEQ ID NO: 68 - DNA, 19 bp, synthetic construct
  misc_feature 1..19: note = synthetic sequence
  modified_base 11: mod_base = OTHER; note = uracil
  modified_base 18: mod_base = OTHER; note = uracil
  source 1..19: mol_type = other DNA
atcactggactccagtctg

SEQ ID NO: 69 - DNA, 19 bp, synthetic construct
  misc_feature 1..19: note = synthetic sequence
  modified_base 11: mod_base = OTHER; note = uracil
  modified_base 18: mod_base = OTHER; note = uracil
  source 1..19: mol_type = other DNA
atcagtgggctccagtctg

SEQ ID NO: 70 - DNA, 19 bp, synthetic construct
  misc_feature 1..19: note = synthetic sequence
  modified_base 6: mod_base = OTHER; note = uracil
  modified_base 18: mod_base = OTHER; note = uracil
  source 1..19: mol_type = other DNA
atcactggggcccaggctg

SEQ ID NO: 71 - DNA, 19 bp, synthetic construct
  misc_feature 1..19: note = synthetic sequence
  modified_base 11: mod_base = OTHER; note = uracil
  modified_base 18: mod_base = OTHER; note = uracil
  source 1..19: mol_type = other DNA
atctccaacctccagtctg

SEQ ID NO: 72 - DNA, 19 bp, synthetic construct
  misc_feature 1..19: note = synthetic sequence
  modified_base 11: mod_base = OTHER; note = uracil
  modified_base 18: mod_base = OTHER; note = uracil
  source 1..19: mol_type = other DNA
acctctgggctccaggctg

SEQ ID NO: 73 - DNA, 19 bp, synthetic construct
  misc_feature 1..19: note = synthetic sequence
  modified_base 9: mod_base = OTHER; note = uracil
  modified_base 18: mod_base = OTHER; note = uracil
  source 1..19: mol_type = other DNA
ctttcgggtgcgcagcctg

SEQ ID NO: 74 - DNA, 19 bp, synthetic construct
  misc_feature 1..19: note = synthetic sequence
  modified_base 11: mod_base = OTHER; note = uracil
  modified_base 18: mod_base = OTHER; note = uracil
  source 1..19: mol_type = other DNA
atctctggactccaggctg

SEQ ID NO: 75 - DNA, 19 bp, synthetic construct
  misc_feature 1..19: note = synthetic sequence
  modified_base 11: mod_base = OTHER; note = uracil
  modified_base 18: mod_base = OTHER; note = uracil
  source 1..19: mol_type = other DNA
atctccgggctccagtctg

SEQ ID NO: 76 - DNA, 19 bp, synthetic construct
  misc_feature 1..19: note = synthetic sequence
  modified_base 11: mod_base = OTHER; note = uracil
  modified_base 18: mod_base = OTHER; note = uracil
  source 1..19: mol_type = other DNA
atcactgggctccaggctg

SEQ ID NO: 77 - DNA, 19 bp, synthetic construct
  misc_feature 1..19: note = synthetic sequence
  modified_base 11: mod_base = OTHER; note = uracil
  modified_base 18: mod_base = OTHER; note = uracil
  source 1..19: mol_type = other DNA
atctccaacctccagtttg

SEQ ID NO: 78 - DNA, 19 bp, synthetic construct
  misc_feature 1..19: note = synthetic sequence
  modified_base 11: mod_base = OTHER; note = uracil
  modified_base 18: mod_base = OTHER; note = uracil
  source 1..19: mol_type = other DNA
atctcgggcctctagcctg

SEQ ID NO: 79 - DNA, 19 bp, synthetic construct
  misc_feature 1..19: note = synthetic sequence
  modified_base 12: mod_base = OTHER; note = uracil
  modified_base 18: mod_base = OTHER; note = uracil
  source 1..19: mol_type = other DNA
atcatcagggctcagactg

SEQ ID NO: 80 - DNA, 19 bp, synthetic construct
  misc_feature 1..19: note = synthetic sequence
  modified_base 11: mod_base = OTHER; note = uracil
  modified_base 18: mod_base = OTHER; note = uracil
  source 1..19: mol_type = other DNA
atctccagcctccagtctg

SEQ ID NO: 81 - DNA, 19 bp, synthetic construct
  misc_feature 1..19: note = synthetic sequence
  modified_base 11: mod_base = OTHER; note = uracil
  modified_base 18: mod_base = OTHER; note = uracil
  source 1..19: mol_type = other DNA
gtctctgggctccaggctg

SEQ ID NO: 82 - DNA, 19 bp, synthetic construct
  misc_feature 1..19: note = synthetic sequence
  modified_base 11: mod_base = OTHER; note = uracil
  modified_base 16: mod_base = OTHER; note = uracil
  source 1..19: mol_type = other DNA
atcagtgggctccggtccg

SEQ ID NO: 83 - DNA, 21 bp, synthetic construct
  misc_feature 1..21: note = synthetic sequence
  modified_base 4: mod_base = OTHER; note = uracil
  modified_base 16: mod_base = OTHER; note = uracil
  source 1..21: mol_type = other DNA
ccatcagcagggtcctgaccg

SEQ ID NO: 84 - DNA, 21 bp, synthetic construct
  misc_feature 1..21: note = synthetic sequence
  modified_base 4: mod_base = OTHER; note = uracil
  modified_base 13: mod_base = OTHER; note = uracil
  source 1..21: mol_type = other DNA
ccatcagtggagtccaggcag

SEQ ID NO: 85 - DNA, 21 bp, synthetic construct
  misc_feature 1..21: note = synthetic sequence
  modified_base 13: mod_base = OTHER; note = uracil
  modified_base 20: mod_base = OTHER; note = uracil
  source 1..21: mol_type = other DNA
ccatcagcaggatcgaggctg

SEQ ID NO: 86 - DNA, 21 bp, synthetic construct
  misc_feature 1..21: note = synthetic sequence
  modified_base 13: mod_base = OTHER; note = uracil
  modified_base 20: mod_base = OTHER; note = uracil
  source 1..21: mol_type = other DNA
tcatttctacaatcccgtctg

SEQ ID NO: 87 - DNA, 21 bp, synthetic construct
  misc_feature 1..21: note = synthetic sequence
  modified_base 8: mod_base = OTHER; note = uracil
  modified_base 14: mod_base = OTHER; note = uracil
  source 1..21: mol_type = other DNA
ccatcactggggctcaggcgg

SEQ ID NO: 88 - DNA, 21 bp, synthetic construct
  misc_feature 1..21: note = synthetic sequence
  modified_base 13: mod_base = OTHER; note = uracil
  modified_base 20: mod_base = OTHER; note = uracil
  source 1..21: mol_type = other DNA
tcatctctgggctccagcctg

SEQ ID NO: 89 - DNA, 21 bp, synthetic construct
  misc_feature 1..21: note = synthetic sequence
  modified_base 8: mod_base = OTHER; note = uracil
  modified_base 20: mod_base = OTHER; note = uracil
  source 1..21: mol_type = other DNA
ccatcactgggattcaggttg

SEQ ID NO: 90 - DNA, 21 bp, synthetic construct
  misc_feature 1..21: note = synthetic sequence
  modified_base 5: mod_base = OTHER; note = uracil
  modified_base 16: mod_base = OTHER; note = uracil
  source 1..21: mol_type = other DNA
ccattagcagggtcctgacca

SEQ ID NO: 91 - DNA, 21 bp, synthetic construct
  misc_feature 1..21: note = synthetic sequence
  modified_base 4: mod_base = OTHER; note = uracil
  modified_base 20: mod_base = OTHER; note = uracil
  source 1..21: mol_type = other DNA
ccatcagcggggcccaggttg

SEQ ID NO: 92 - DNA, 21 bp, synthetic construct
  misc_feature 1..21: note = synthetic sequence
  modified_base 4: mod_base = OTHER; note = uracil
  modified_base 13: mod_base = OTHER; note = uracil
  source 1..21: mol_type = other DNA
ccatcagcagggtcgaagccg

SEQ ID NO: 93 - DNA, 21 bp, synthetic construct
  misc_feature 1..21: note = synthetic sequence
  modified_base 6: mod_base = OTHER; note = uracil
  modified_base 13: mod_base = OTHER; note = uracil
  source 1..21: mol_type = other DNA
ccatctctggcctccagacca

SEQ ID NO: 94 - DNA, 21 bp, synthetic construct
  misc_feature 1..21: note = synthetic sequence
  source 1..21: mol_type = other DNA
ccatcacgggggcccaggcag

SEQ ID NO: 95 - DNA, 21 bp, synthetic construct
  misc_feature 1..21: note = synthetic sequence
  modified_base 13: mod_base = OTHER; note = uracil
  modified_base 20: mod_base = OTHER; note = uracil
  source 1..21: mol_type = other DNA
gcatcaccggactccagactg

SEQ ID NO: 96 - DNA, 21 bp, synthetic construct
  misc_feature 1..21: note = synthetic sequence
  modified_base 8: mod_base = OTHER; note = uracil
  modified_base 20: mod_base = OTHER; note = uracil
  source 1..21: mol_type = other DNA
ccatcagtggagcccaggctg

SEQ ID NO: 97 - DNA, 21 bp, synthetic construct
  misc_feature 1..21: note = synthetic sequence
  modified_base 8: mod_base = OTHER; note = uracil
  modified_base 20: mod_base = OTHER; note = uracil
  source 1..21: mol_type = other DNA
gcatctctgagctgcagcctg

SEQ ID NO: 98 - DNA, 21 bp, synthetic construct
  misc_feature 1..21: note = synthetic sequence
  modified_base 8: mod_base = OTHER; note = uracil
  modified_base 20: mod_base = OTHER; note = uracil
  source 1..21: mol_type = other DNA
ccatcactggggctcaggttg

SEQ ID NO: 99 - DNA, 21 bp, synthetic construct
  misc_feature 1..21: note = synthetic sequence
  modified_base 8: mod_base = OTHER; note = uracil
  modified_base 20: mod_base = OTHER; note = uracil
  source 1..21: mol_type = other DNA
ccatctctggactgaagactg

SEQ ID NO: 100 - DNA, 21 bp, synthetic construct
  misc_feature 1..21: note = synthetic sequence
  modified_base 8: mod_base = OTHER; note = uracil
  modified_base 19: mod_base = OTHER; note = uracil
  source 1..21: mol_type = other DNA
ctatcagtggggcccaggtgg

SEQ ID NO: 101 - DNA, 21 bp, synthetic construct
  misc_feature 1..21: note = synthetic sequence
  modified_base 4: mod_base = OTHER; note = uracil
  modified_base 13: mod_base = OTHER; note = uracil
  source 1..21: mol_type = other DNA
ccatcaagaacatccaggaag

SEQ ID NO: 102 - DNA, 21 bp, synthetic construct
  misc_feature 1..21: note = synthetic sequence
  source 1..21: mol_type = other DNA
ccatcagcagagcccaagccg

SEQ ID NO: 103 - DNA, 21 bp, synthetic construct
  misc_feature 1..21: note = synthetic sequence
  modified_base 8: mod_base = OTHER; note = uracil
  modified_base 18: mod_base = OTHER; note = uracil
  source 1..21: mol_type = other DNA
ccatctctgggctcaagtccg

SEQ ID NO: 104 - DNA, 21 bp, synthetic construct
  misc_feature 1..21: note = synthetic sequence
  modified_base 8: mod_base = OTHER; note = uracil
  modified_base 20: mod_base = OTHER; note = uracil
  source 1..21: mol_type = other DNA
gcaccactgggctctgggctg

SEQ ID NO: 105 - DNA, 21 bp, synthetic construct
  misc_feature 1..21: note = synthetic sequence
  modified_base 8: mod_base = OTHER; note = uracil
  modified_base 20: mod_base = OTHER; note = uracil
  source 1..21: mol_type = other DNA
gcatcactggcctctggcctg

SEQ ID NO: 106 - DNA, 21 bp, synthetic construct
  misc_feature 1..21: note = synthetic sequence
  modified_base 4: mod_base = OTHER; note = uracil
  modified_base 20: mod_base = OTHER; note = uracil
  source 1..21: mol_type = other DNA
ccatcagcgggacccaggcta

SEQ ID NO: 107 - DNA, 21 bp, synthetic construct
  misc_feature 1..21: note = synthetic sequence
  modified_base 8: mod_base = OTHER; note = uracil
  modified_base 19: mod_base = OTHER; note = uracil
  source 1..21: mol_type = other DNA
ccatcagtggggcccaggtgg

SEQ ID NO: 108 - DNA, 21 bp, synthetic construct
  misc_feature 1..21: note = synthetic sequence
  modified_base 13: mod_base = OTHER; note = uracil
  modified_base 20: mod_base = OTHER; note = uracil
  source 1..21: mol_type = other DNA
ccttctccaacctccagtctg

SEQ ID NO: 109 - DNA, 21 bp, synthetic construct
  misc_feature 1..21: note = synthetic sequence
  modified_base 2: mod_base = OTHER; note = uracil
  modified_base 12: mod_base = OTHER; note = uracil
  source 1..21: mol_type = other DNA
ctgataatcaatgggccccag

SEQ ID NO: 110 - DNA, 20 bp, synthetic construct
  misc_feature 1..20: note = synthetic sequence
  modified_base 1: mod_base = OTHER; note = uracil
  modified_base 11: mod_base = OTHER; note = uracil
  source 1..20: mol_type = other DNA
tgaccattagtggggcccag

SEQ ID NO: 111 - DNA, 21 bp, synthetic construct
  misc_feature 1..21: note = synthetic sequence
  modified_base 2: mod_base = OTHER; note = uracil
  modified_base 12: mod_base = OTHER; note = uracil
  source 1..21: mol_type = other DNA
ctgaccattagtggggcccag

SEQ ID NO: 112 - DNA, 19 bp, synthetic construct
  misc_feature 1..19: note = synthetic sequence
  source 1..19: mol_type = other DNA
ggccatcaacagggcccag

SEQ ID NO: 113 - DNA, 22 bp, synthetic construct
  misc_feature 1..22: note = synthetic sequence
  modified_base 12: mod_base = OTHER; note = uracil
  modified_base 21: mod_base = OTHER; note = uracil
  source 1..22: mol_type = other DNA
ctgcacatttctgagcagcctg

SEQ ID NO: 114 - DNA, 21 bp, synthetic construct
  misc_feature 1..21: note = synthetic sequence
  modified_base 2: mod_base = OTHER; note = uracil
  modified_base 12: mod_base = OTHER; note = uracil
  source 1..21: mol_type = other DNA
ttgattattaatggggcacag

SEQ ID NO: 115 - DNA, 22 bp, synthetic construct
  misc_feature 1..22: note = synthetic sequence
  modified_base 2: mod_base = OTHER; note = uracil
  modified_base 12: mod_base = OTHER; note = uracil
  source 1..22: mol_type = other DNA
ttgattattaatgggggcacag

SEQ ID NO: 116 - DNA, 20 bp, synthetic construct
  misc_feature 1..20: note = synthetic sequence
  modified_base 2: mod_base = OTHER; note = uracil
  modified_base 11: mod_base = OTHER; note = uracil
  source 1..20: mol_type = other DNA
ctcttgggtgtgcagcccga

SEQ ID NO: 117 - DNA, 21 bp, synthetic construct
  misc_feature 1..21: note = synthetic sequence
  source 1..21: mol_type = other DNA
atcatcagggctcagactgag

SEQ ID NO: 118 - DNA, 21 bp, synthetic construct
  misc_feature 1..21: note = synthetic sequence
  source 1..21: mol_type = other DNA
atctctggactccaggctgag

SEQ ID NO: 119 - DNA, 21 bp, synthetic construct
  misc_feature 1..21: note = synthetic sequence
  source 1..21: mol_type = other DNA
atcactggggcccaggctgag

SEQ ID NO: 120 - DNA, 21 bp, synthetic construct
  misc_feature 1..21: note = synthetic sequence
  source 1..21: mol_type = other DNA
atctccagcctccagtctgag

SEQ ID NO: 121 - DNA, 21 bp, synthetic construct
  misc_feature 1..21: note = synthetic sequence
  source 1..21: mol_type = other DNA
atctctgggctccagtctgag

SEQ ID NO: 122 - DNA, 21 bp, synthetic construct
  misc_feature 1..21: note = synthetic sequence
  source 1..21: mol_type = other DNA
atctctgggctccagtctgaa

SEQ ID NO: 123 - DNA, 21 bp, synthetic construct
  misc_feature 1..21: note = synthetic sequence
  source 1..21: mol_type = other DNA
gtctctgggctccaggctgag

SEQ ID NO: 124 - DNA, 21 bp, synthetic construct
  misc_feature 1..21: note = synthetic sequence
  source 1..21: mol_type = other DNA
atctccgggctccagtctgag

SEQ ID NO: 125 - DNA, 21 bp, synthetic construct
  misc_feature 1..21: note = synthetic sequence
  source 1..21: mol_type = other DNA
atcactggactccagtctgag

SEQ ID NO: 126 - DNA, 21 bp, synthetic construct
  misc_feature 1..21: note = synthetic sequence
  source 1..21: mol_type = other DNA
atctctgggctccagcctgag

SEQ ID NO: 127 - DNA, 21 bp, synthetic construct
  misc_feature 1..21: note = synthetic sequence
  source 1..21: mol_type = other DNA
atcagcagggctcagactgag

SEQ ID NO: 128 - DNA, 21 bp, synthetic construct
  misc_feature 1..21: note = synthetic sequence
  source 1..21: mol_type = other DNA
cttttgggtgcgcagcctgag

SEQ ID NO: 129 - DNA, 21 bp, synthetic construct
  misc_feature 1..21: note = synthetic sequence
  source 1..21: mol_type = other DNA
ctttcgggtgcgcagcctgag

SEQ ID NO: 130 - DNA, 21 bp, synthetic construct
  misc_feature 1..21: note = synthetic sequence
  source 1..21: mol_type = other DNA
atctctgggctccaggctgag

SEQ ID NO: 131 - DNA, 21 bp, synthetic construct
  misc_feature 1..21: note = synthetic sequence
  source 1..21: mol_type = other DNA
atctcgggcctctagcctgag

SEQ ID NO: 132 - DNA, 21 bp, synthetic construct
  misc_feature 1..21: note = synthetic sequence
  source 1..21: mol_type = other DNA
atctccaacctccagtttgag

SEQ ID NO: 133 - DNA, 21 bp, synthetic construct
  misc_feature 1..21: note = synthetic sequence
  source 1..21: mol_type = other DNA
atctctgggctctagtctgag

SEQ ID NO: 134 - DNA, 21 bp, synthetic construct
  misc_feature 1..21: note = synthetic sequence
  source 1..21: mol_type = other DNA
acctctgggctccaggctgag

SEQ ID NO: 135 - DNA, 21 bp, synthetic construct
  misc_feature 1..21: note = synthetic sequence
  source 1..21: mol_type = other DNA
atcagtgggctccagtctgag

SEQ ID NO: 136 - DNA, 21 bp, synthetic construct
  misc_feature 1..21: note = synthetic sequence
  source 1..21: mol_type = other DNA
atcagtgggctccggtccgag

SEQ ID NO: 137 - DNA, 21 bp, synthetic construct
  misc_feature 1..21: note = synthetic sequence
  source 1..21: mol_type = other DNA
atctccaacctccagttagag

SEQ ID NO: 138 - DNA, 21 bp, synthetic construct
  misc_feature 1..21: note = synthetic sequence
  source 1..21: mol_type = other DNA
attactggactccagcctgag

SEQ ID NO: 139 - DNA, 21 bp, synthetic construct
  misc_feature 1..21: note = synthetic sequence
  source 1..21: mol_type = other DNA
atctccaacctccagtctgag

SEQ ID NO: 140 - DNA, 21 bp, synthetic construct
  misc_feature 1..21: note = synthetic sequence
  source 1..21: mol_type = other DNA
atcactgggctccaggctgag

SEQ ID NO: 141 - DNA, 21 bp, synthetic construct
  misc_feature 1..21: note = synthetic sequence
  source 1..21: mol_type = other DNA
ctgtcaggtgtgcagcctgag

SEQ ID NO: 142 - DNA, 22 bp, synthetic construct
  misc_feature 1..22: note = synthetic sequence
  source 1..22: mol_type = other DNA
catctctgggctcaagtccgag

SEQ ID NO: 143 - DNA, 22 bp, synthetic construct
  misc_feature 1..22: note = synthetic sequence
  source 1..22: mol_type = other DNA
catctctggcctccagaccaag

SEQ ID NO: 144 - DNA, 22 bp, synthetic construct
  misc_feature 1..22: note = synthetic sequence
  source 1..22: mol_type = other DNA
catttctacaatcccgtctgag

SEQ ID NO: 145 - DNA, 22 bp, synthetic construct
  misc_feature 1..22: note = synthetic sequence
  source 1..22: mol_type = other DNA
catcactggcctctggcctgag

SEQ ID NO: 146 - DNA, 22 bp, synthetic construct
  misc_feature 1..22: note = synthetic sequence
  source 1..22: mol_type = other DNA
cttctccaacctccagtctgac

SEQ ID NO: 147 - DNA, 22 bp, synthetic construct
  misc_feature 1..22: note = synthetic sequence
  source 1..22: mol_type = other DNA
catcactggggctcaggcggaa

SEQ ID NO: 148 - DNA, 22 bp, synthetic construct
  misc_feature 1..22: note = synthetic sequence
  source 1..22: mol_type = other DNA
catcaagaacatccaggaagag

SEQ ID NO: 149 - DNA, 22 bp, synthetic construct
  misc_feature 1..22: note = synthetic sequence
  source 1..22: mol_type = other DNA
catcactggggctcaggttgaa

SEQ ID NO: 150 - DNA, 22 bp, synthetic construct
  misc_feature 1..22: note = synthetic sequence
  source 1..22: mol_type = other DNA
cattagcagggtcctgaccaaa

SEQ ID NO: 151 - DNA, 22 bp, synthetic construct
  misc_feature 1..22: note = synthetic sequence
  source 1..22: mol_type = other DNA
catcagcagggtcctgaccgaa

SEQ ID NO: 152 - DNA, 22 bp, synthetic construct
  misc_feature 1..22: note = synthetic sequence
  source 1..22: mol_type = other DNA
catcagcagagcccaagccggg

SEQ ID NO: 153 - DNA, 22 bp, synthetic construct
  misc_feature 1..22: note = synthetic sequence
  source 1..22: mol_type = other DNA
catctctgggctccagcctgag

SEQ ID NO: 154 - DNA, 22 bp, synthetic construct
  misc_feature 1..22: note = synthetic sequence
  source 1..22: mol_type = other DNA
catcacgggggcccaggcagat

SEQ ID NO: 155 - DNA, 22 bp, synthetic construct
  misc_feature 1..22: note = synthetic sequence
  source 1..22: mol_type = other DNA
catcagcagggtcgaagccggg

SEQ ID NO: 156 - DNA, 22 bp, synthetic construct
  misc_feature 1..22: note = synthetic sequence
  source 1..22: mol_type = other DNA
catcagtggagtccaggcagaa

SEQ ID NO: 157 - DNA, 22 bp, synthetic construct
  misc_feature 1..22: note = synthetic sequence
  source 1..22: mol_type = other DNA
catcactgggattcaggttgaa

SEQ ID NO: 158 - DNA, 22 bp, synthetic construct
  misc_feature 1..22: note = synthetic sequence
  source 1..22: mol_type = other DNA
catcagcggggcccaggttgag

SEQ ID NO: 159 - DNA, 22 bp, synthetic construct
  misc_feature 1..22: note = synthetic sequence
  source 1..22: mol_type = other DNA
tatcagtggggcccaggtggag

SEQ ID NO: 160 - DNA, 22 bp, synthetic construct
  misc_feature 1..22: note = synthetic sequence
  source 1..22: mol_type = other DNA
catcagtggggcccaggtggag

SEQ ID NO: 161 - DNA, 22 bp, synthetic construct
  misc_feature 1..22: note = synthetic sequence
  source 1..22: mol_type = other DNA
catcaccggactccagactggg

SEQ ID NO: 162 - DNA, 22 bp, synthetic construct
  misc_feature 1..22: note = synthetic sequence
  source 1..22: mol_type = other DNA
catctctggactgaagactgag

SEQ ID NO: 163 - DNA, 22 bp, synthetic construct
  misc_feature 1..22: note = synthetic sequence
  source 1..22: mol_type = other DNA
catcagtggagcccaggctggg

SEQ ID NO: 164 - DNA, 22 bp, synthetic construct
  misc_feature 1..22: note = synthetic sequence
  source 1..22: mol_type = other DNA
catctctgagctgcagcctgag

SEQ ID NO: 165 - DNA, 22 bp, synthetic construct
  misc_feature 1..22: note = synthetic sequence
  source 1..22: mol_type = other DNA
catcagcaggatcgaggctggg

SEQ ID NO: 166 - DNA, 22 bp, synthetic construct
  misc_feature 1..22: note = synthetic sequence
  source 1..22: mol_type = other DNA
caccactgggctctgggctgag

SEQ ID NO: 167 - DNA, 22 bp, synthetic construct
  misc_feature 1..22: note = synthetic sequence
  source 1..22: mol_type = other DNA
catcagcgggacccaggctatg

SEQ ID NO: 168 - DNA, 22 bp, synthetic construct
  misc_feature 1..22: note = synthetic sequence
  source 1..22: mol_type = other DNA
catcaagaacatccaggaagaa

SEQ ID NO: 169 - DNA, 21 bp, synthetic construct
  misc_feature 1..21: note = synthetic sequence
  source 1..21: mol_type = other DNA
ggccatcaacagggcccaggc

SEQ ID NO: 170 - DNA, 21 bp, synthetic construct
  misc_feature 1..21: note = synthetic sequence
  source 1..21: mol_type = other DNA
gaccattagtggggcccaggc

SEQ ID NO: 171 - DNA, 22 bp, synthetic construct
  misc_feature 1..22: note = synthetic sequence
  source 1..22: mol_type = other DNA
gattattaatgggggcacagga

SEQ ID NO: 172 - DNA, 22 bp, synthetic construct
  misc_feature 1..22: note = synthetic sequence
  source 1..22: mol_type = other DNA
gcacatttctgagcagcctgag

SEQ ID NO: 173 - DNA, 21 bp, synthetic construct
  misc_feature 1..21: note = synthetic sequence
  source 1..21: mol_type = other DNA
gattattaatggggcacagga

SEQ ID NO: 174 - DNA, 21 bp, synthetic construct
  misc_feature 1..21: note = synthetic sequence
  source 1..21: mol_type = other DNA
gataatcaatgggccccaggc

SEQ ID NO: 175 - DNA, 20 bp, synthetic construct
  misc_feature 1..20: note = synthetic sequence
  source 1..20: mol_type = other DNA
cttgggtgtgcagcccgaga

SEQ ID NO: 176 - DNA, 21 bp, synthetic construct
  misc_feature 1..21: note = synthetic sequence
  modified_base 12: mod_base = OTHER; note = uracil
  modified_base 18: mod_base = OTHER; note = uracil
  source 1..21: mol_type = other DNA
atcatcagggctcagactgag

SEQ ID NO: 177 - DNA, 21 bp, synthetic construct
  misc_feature 1..21: note = synthetic sequence
  modified_base 11: mod_base = OTHER; note = uracil
  modified_base 18: mod_base = OTHER; note = uracil
  source 1..21: mol_type = other DNA
atctctggactccaggctgag

SEQ ID NO: 178 - DNA, 21 bp, synthetic construct
  misc_feature 1..21: note = synthetic sequence
  modified_base 6: mod_base = OTHER; note = uracil
  modified_base 18: mod_base = OTHER; note = uracil
  source 1..21: mol_type = other DNA
atcactggggcccaggctgag

SEQ ID NO: 179 - DNA, 21 bp, synthetic construct
  misc_feature 1..21: note = synthetic sequence
  modified_base 11: mod_base = OTHER; note = uracil
  modified_base 18: mod_base = OTHER; note = uracil
  source 1..21: mol_type = other DNA
atctccagcctccagtctgag

SEQ ID NO: 180 - DNA, 21 bp, synthetic construct
  misc_feature 1..21: note = synthetic sequence
  modified_base 11: mod_base = OTHER; note = uracil
  modified_base 18: mod_base = OTHER; note = uracil
  source 1..21: mol_type = other DNA
atctctgggctccagtctgag

SEQ ID NO: 181 - DNA, 21 bp, synthetic construct
  misc_feature 1..21: note = synthetic sequence
  modified_base 11: mod_base = OTHER; note = uracil
  modified_base 18: mod_base = OTHER; note = uracil
  source 1..21: mol_type = other DNA
atctctgggctccagtctgaa

SEQ ID NO: 182 - DNA, 21 bp, synthetic construct
  misc_feature 1..21: note = synthetic sequence
  modified_base 11: mod_base = OTHER; note = uracil
  modified_base 18: mod_base = OTHER; note = uracil
  source 1..21: mol_type = other DNA
gtctctgggctccaggctgag

SEQ ID NO: 183 - DNA, 21 bp, synthetic construct
  misc_feature 1..21: note = synthetic sequence
  modified_base 11: mod_base = OTHER; note = uracil
  modified_base 18: mod_base = OTHER; note = uracil
  source 1..21: mol_type = other DNA
atctccgggctccagtctgag

SEQ ID NO: 184 - DNA, 21 bp, synthetic construct
  misc_feature 1..21: note = synthetic sequence
  modified_base 11: mod_base = OTHER; note = uracil
  modified_base 18: mod_base = OTHER; note = uracil
  source 1..21: mol_type = other DNA
atcactggactccagtctgag

SEQ ID NO: 185 - DNA, 21 bp, synthetic construct
  misc_feature 1..21: note = synthetic sequence
  modified_base 11: mod_base = OTHER; note = uracil
  modified_base 18: mod_base = OTHER; note = uracil
  source 1..21: mol_type = other DNA
atctctgggctccagcctgag

SEQ ID NO: 186 - DNA, 21 bp, synthetic construct
  misc_feature 1..21: note = synthetic sequence
  modified_base 12: mod_base = OTHER; note = uracil
  modified_base 18: mod_base = OTHER; note = uracil
  source 1..21: mol_type = other DNA
atcagcagggctcagactgag

SEQ ID NO: 187 - DNA, 21 bp, synthetic construct
  misc_feature 1..21: note = synthetic sequence
  modified_base 9: mod_base = OTHER; note = uracil
  modified_base 18: mod_base = OTHER; note = uracil
  source 1..21: mol_type = other DNA
cttttgggtgcgcagcctgag

SEQ ID NO: 188 - DNA, 21 bp, synthetic construct
  misc_feature 1..21: note = synthetic sequence
  modified_base 9: mod_base = OTHER; note = uracil
  modified_base 18: mod_base = OTHER; note = uracil
  source 1..21: mol_type = other DNA
ctttcgggtgcgcagcctgag

SEQ ID NO: 189 - DNA, 21 bp, synthetic construct
  misc_feature 1..21: note = synthetic sequence
  modified_base 11: mod_base = OTHER; note = uracil
  modified_base 18: mod_base = OTHER; note = uracil
  source 1..21: mol_type = other DNA
atctctgggctccaggctgag

SEQ ID NO: 190 - DNA, 21 bp, synthetic construct
  misc_feature 1..21: note = synthetic sequence
  modified_base 11: mod_base = OTHER; note = uracil
  modified_base 18: mod_base = OTHER; note = uracil
  source 1..21: mol_type = other DNA
atctcgggcctctagcctgag

SEQ ID NO: 191 - DNA, 21 bp, synthetic construct
  misc_feature 1..21: note = synthetic sequence
  modified_base 11: mod_base = OTHER; note = uracil
  modified_base 18: mod_base = OTHER; note = uracil
  source 1..21: mol_type = other DNA
atctccaacctccagtttgag

SEQ ID NO: 192 - DNA, 21 bp, synthetic construct
  misc_feature 1..21: note = synthetic sequence
  modified_base 11: mod_base = OTHER; note = uracil
  modified_base 18: mod_base = OTHER; note = uracil
  source 1..21: mol_type = other DNA
atctctgggctctagtctgag

SEQ ID NO: 193 - DNA, 21 bp, synthetic construct
  misc_feature 1..21: note = synthetic sequence
  modified_base 11: mod_base = OTHER; note = uracil
  modified_base 18: mod_base = OTHER; note = uracil
  source 1..21: mol_type = other DNA
acctctgggctccaggctgag

SEQ ID NO: 194 - DNA, 21 bp, synthetic construct
  misc_feature 1..21: note = synthetic sequence
  modified_base 11: mod_base = OTHER; note = uracil
  modified_base 18: mod_base = OTHER; note = uracil
  source 1..21: mol_type = other DNA
atcagtgggctccagtctgag

SEQ ID NO: 195 - DNA, 21 bp, synthetic construct
  misc_feature 1..21: note = synthetic sequence
  modified_base 11: mod_base = OTHER; note = uracil
  modified_base 16: mod_base = OTHER; note = uracil
  source 1..21: mol_type = other DNA
atcagtgggctccggtccgag

SEQ ID NO: 196 - DNA, 21 bp, synthetic construct
  misc_feature 1..21: note = synthetic sequence
  modified_base 11: mod_base = OTHER; note = uracil
  modified_base 17: mod_base = OTHER; note = uracil
  source 1..21: mol_type = other DNA
atctccaacctccagttagag

SEQ ID NO: 197 - DNA, 21 bp, synthetic construct
  misc_feature 1..21: note = synthetic sequence
  modified_base 11: mod_base = OTHER; note = uracil
  modified_base 18: mod_base = OTHER; note = uracil
  source 1..21: mol_type = other DNA
attactggactccagcctgag

SEQ ID NO: 198 - DNA, 21 bp, synthetic construct
  misc_feature 1..21: note = synthetic sequence
  modified_base 11: mod_base = OTHER; note = uracil
  modified_base 18: mod_base = OTHER; note = uracil
  source 1..21: mol_type = other DNA
atctccaacctccagtctgag

SEQ ID NO: 199 - DNA, 21 bp, synthetic construct
  misc_feature 1..21: note = synthetic sequence
  modified_base 11: mod_base = OTHER; note = uracil
  modified_base 18: mod_base = OTHER; note = uracil
  source 1..21: mol_type = other DNA
atcactgggctccaggctgag

SEQ ID NO: 200 - DNA, 21 bp, synthetic construct
  misc_feature 1..21: note = synthetic sequence
  modified_base 9: mod_base = OTHER; note = uracil
  modified_base 18: mod_base = OTHER; note = uracil
  source 1..21: mol_type = other DNA
ctgtcaggtgtgcagcctgag

SEQ ID NO: 201 - DNA, 22 bp, synthetic construct
  misc_feature 1..22: note = synthetic sequence
  modified_base 7: mod_base = OTHER; note = uracil
  modified_base 17: mod_base = OTHER; note = uracil
  source 1..22: mol_type = other DNA
catctctgggctcaagtccgag

SEQ ID NO: 202 - DNA, 22 bp, synthetic construct
  misc_feature 1..22: note = synthetic sequence
  modified_base 3: mod_base = OTHER; note = uracil
  modified_base 12: mod_base = OTHER; note = uracil
  source 1..22: mol_type = other DNA
catctctggcctccagaccaag

SEQ ID NO: 203 - DNA, 22 bp, synthetic construct
  misc_feature 1..22: note = synthetic sequence
  modified_base 12: mod_base = OTHER; note = uracil
  modified_base 19: mod_base = OTHER; note = uracil
  source 1..22: mol_type = other DNA
catttctacaatcccgtctgag

SEQ ID NO: 204 - DNA, 22 bp, synthetic construct
  misc_feature 1..22: note = synthetic sequence
  modified_base 12: mod_base = OTHER; note = uracil
  modified_base 19: mod_base = OTHER; note = uracil
  source 1..22: mol_type = other DNA
catcactggcctctggcctgag

SEQ ID NO: 205 - DNA, 22 bp, synthetic construct
  misc_feature 1..22: note = synthetic sequence
  modified_base 12: mod_base = OTHER; note = uracil
  modified_base 19: mod_base = OTHER; note = uracil
  source 1..22: mol_type = other DNA
cttctccaacctccagtctgac

SEQ ID NO: 206 - DNA, 22 bp, synthetic construct
  misc_feature 1..22: note = synthetic sequence
  modified_base 7: mod_base = OTHER; note = uracil
  modified_base 13: mod_base = OTHER; note = uracil
  source 1..22: mol_type = other DNA
catcactggggctcaggcggaa

SEQ ID NO: 207 - DNA, 22 bp, synthetic construct
  misc_feature 1..22: note = synthetic sequence
  modified_base 3: mod_base = OTHER; note = uracil
  modified_base 12: mod_base = OTHER; note = uracil
  source 1..22: mol_type = other DNA
catcaagaacatccaggaagag

SEQ ID NO: 208 - DNA, 22 bp, synthetic construct
  misc_feature 1..22: note = synthetic sequence
  modified_base 7: mod_base = OTHER; note = uracil
  modified_base 19: mod_base = OTHER; note = uracil
  source 1..22: mol_type = other DNA
catcactggggctcaggttgaa

SEQ ID NO: 209 - DNA, 22 bp, synthetic construct
  misc_feature 1..22: note = synthetic sequence
  modified_base 4: mod_base = OTHER; note = uracil
  modified_base 15: mod_base = OTHER; note = uracil
  source 1..22: mol_type = other DNA
cattagcagggtcctgaccaaa

SEQ ID NO: 210 - DNA, 22 bp, synthetic construct
  misc_feature 1..22: note = synthetic sequence
  modified_base 12: mod_base = OTHER; note = uracil
  modified_base 15: mod_base = OTHER; note = uracil
  source 1..22: mol_type = other DNA
catcagcagggtcctgaccgaa

SEQ ID NO: 211 - DNA, 22 bp, synthetic construct
  misc_feature 1..22: note = synthetic sequence
  source 1..22: mol_type = other DNA
catcagcagagcccaagccggg

SEQ ID NO: 212 - DNA, 22 bp, synthetic construct
  misc_feature 1..22: note = synthetic sequence
  modified_base 12: mod_base = OTHER; note = uracil
  modified_base 19: mod_base = OTHER; note = uracil
  source 1..22: mol_type = other DNA
catctctgggctccagcctgag

SEQ ID NO: 213 - DNA, 22 bp, synthetic construct
  misc_feature 1..22: note = synthetic sequence
  source 1..22: mol_type = other DNA
catcacgggggcccaggcagat

SEQ ID NO: 214 - DNA, 22 bp, synthetic construct
  misc_feature 1..22: note = synthetic sequence
  modified_base 3: mod_base = OTHER; note = uracil
  modified_base 12: mod_base = OTHER; note = uracil
  source 1..22: mol_type = other DNA
catcagcagggtcgaagccggg

SEQ ID NO: 215 - DNA, 22 bp, synthetic construct
  misc_feature 1..22: note = synthetic sequence
  modified_base 3: mod_base = OTHER; note = uracil
  modified_base 12: mod_base = OTHER; note = uracil
  source 1..22: mol_type = other DNA
catcagtggagtccaggcagaa

SEQ ID NO: 216 - DNA, 22 bp, synthetic construct
  misc_feature 1..22: note = synthetic sequence
  modified_base 7: mod_base = OTHER; note = uracil
  modified_base 19: mod_base = OTHER; note = uracil
  source 1..22: mol_type = other DNA
catcactgggattcaggttgaa

SEQ ID NO: 217 - DNA, 22 bp, synthetic construct
  misc_feature 1..22: note = synthetic sequence
  modified_base 3: mod_base = OTHER; note = uracil
  modified_base 19: mod_base = OTHER; note = uracil
  source 1..22: mol_type = other DNA
catcagcggggcccaggttgag

SEQ ID NO: 218 - DNA, 22 bp, synthetic construct
  misc_feature 1..22: note = synthetic sequence
  modified_base 7: mod_base = OTHER; note = uracil
  modified_base 18: mod_base = OTHER; note = uracil
  source 1..22: mol_type = other DNA
tatcagtggggcccaggtggag

SEQ ID NO: 219 - DNA, 22 bp, synthetic construct
  misc_feature 1..22: note = synthetic sequence
  modified_base 7: mod_base = OTHER; note = uracil
  modified_base 18: mod_base = OTHER; note = uracil
  source 1..22: mol_type = other DNA
catcagtggggcccaggtggag

SEQ ID NO: 220 - DNA, 22 bp, synthetic construct
  misc_feature 1..22: note = synthetic sequence
  modified_base 12: mod_base = OTHER; note = uracil
  modified_base 19: mod_base = OTHER; note = uracil
  source 1..22: mol_type = other DNA
catcaccggactccagactggg

SEQ ID NO: 221 - DNA, 22 bp, synthetic construct
  misc_feature 1..22: note = synthetic sequence
  modified_base 7: mod_base = OTHER; note = uracil
  modified_base 19: mod_base = OTHER; note = uracil
  source 1..22: mol_type = other DNA
catctctggactgaagactgag

SEQ ID NO: 222 - DNA, 22 bp, synthetic construct
  misc_feature 1..22: note = synthetic sequence
  modified_base 7: mod_base = OTHER; note = uracil
  modified_base 19: mod_base = OTHER; note = uracil
  source 1..22: mol_type = other DNA
catcagtggagcccaggctggg

SEQ ID NO: 223 - DNA, 22 bp, synthetic construct
  misc_feature 1..22: note = synthetic sequence
  modified_base 12: mod_base = OTHER; note = uracil
  modified_base 19: mod_base = OTHER; note = uracil
  source 1..22: mol_type = other DNA
catctctgagctgcagcctgag

SEQ ID NO: 224 - DNA, 22 bp, synthetic construct
  misc_feature 1..22: note = synthetic sequence
  modified_base 12: mod_base = OTHER; note = uracil
  modified_base 19: mod_base = OTHER; note = uracil
  source 1..22: mol_type = other DNA
catcagcaggatcgaggctggg

SEQ ID NO: 225 - DNA, 22 bp, synthetic construct
  misc_feature 1..22: note = synthetic sequence
  modified_base 12: mod_base = OTHER; note = uracil
  modified_base 19: mod_base = OTHER; note = uracil
  source 1..22: mol_type = other DNA
caccactgggctctgggctgag

SEQ ID NO: 226 - DNA, 22 bp, synthetic construct
  misc_feature 1..22: note = synthetic sequence
  modified_base 3: mod_base = OTHER; note = uracil
  modified_base 21: mod_base = OTHER; note = uracil
  source 1..22: mol_type = other DNA
catcagcgggacccaggctatg

SEQ ID NO: 227 - DNA, 22 bp, synthetic construct
  misc_feature 1..22: note = synthetic sequence
  modified_base 3: mod_base = OTHER; note = uracil
  modified_base 12: mod_base = OTHER; note = uracil
  source 1..22: mol_type = other DNA
catcaagaacatccaggaagaa

SEQ ID NO: 228 - DNA, 21 bp, synthetic construct
  misc_feature 1..21: note = synthetic sequence
  source 1..21: mol_type = other DNA
ggccatcaacagggcccaggc

SEQ ID NO: 229 - DNA, 21 bp, synthetic construct
  misc_feature 1..21: note = synthetic sequence
  modified_base 6: mod_base = OTHER; note = uracil
  modified_base 10: mod_base = OTHER; note = uracil
  source 1..21: mol_type = other DNA
gaccattagtggggcccaggc

SEQ ID NO: 230 - DNA, 22 bp, synthetic construct
  misc_feature 1..22: note = synthetic sequence
  modified_base 3: mod_base = OTHER; note = uracil
  modified_base 10: mod_base = OTHER; note = uracil
  source 1..22: mol_type = other DNA
gattattaatgggggcacagga

SEQ ID NO: 231 - DNA, 22 bp, synthetic construct
  misc_feature 1..22: note = synthetic sequence
  modified_base 10: mod_base = OTHER; note = uracil
  modified_base 19: mod_base = OTHER; note = uracil
  source 1..22: mol_type = other DNA
gcacatttctgagcagcctgag

SEQ ID NO: 232 - DNA, 21 bp, synthetic construct
  misc_feature 1..21: note = synthetic sequence
  modified_base 3: mod_base = OTHER; note = uracil
  modified_base 10: mod_base = OTHER; note = uracil
  source 1..21: mol_type = other DNA
gattattaatggggcacagga

SEQ ID NO: 233 - DNA, 21 bp, synthetic construct
  misc_feature 1..21: note = synthetic sequence
  modified_base 3: mod_base = OTHER; note = uracil
  modified_base 10: mod_base = OTHER; note = uracil
  source 1..21: mol_type = other DNA
gataatcaatgggccccaggc

SEQ ID NO: 234 - DNA, 20 bp, synthetic construct
  misc_feature 1..20: note = synthetic sequence
  modified_base 2: mod_base = OTHER; note = uracil
  modified_base 9: mod_base = OTHER; note = uracil
  source 1..20: mol_type = other DNA
cttgggtgtgcagcccgaga

SEQ ID NO: 235 - DNA, 20 bp, synthetic construct
  misc_feature 1..20: note = synthetic sequence
  source 1..20: mol_type = other DNA
gactccagtctgaggatgag

SEQ ID NO: 236 - DNA, 20 bp, synthetic construct
  misc_feature 1..20: note = synthetic sequence
  source 1..20: mol_type = other DNA
ggctccagtctgaggatgag

SEQ ID NO: 237 - DNA, 20 bp, synthetic construct
  misc_feature 1..20: note = synthetic sequence
  source 1..20: mol_type = other DNA
acctccagttagaggatgag

SEQ ID NO: 238 - DNA, 20 bp, synthetic construct
  misc_feature 1..20: note = synthetic sequence
  source 1..20: mol_type = other DNA
acctccagtttgaggatgag

SEQ ID NO: 239 - DNA, 20 bp, synthetic construct
  misc_feature 1..20: note = synthetic sequence
  source 1..20: mol_type = other DNA
gggcccaggctgaggatgag

SEQ ID NO: 240 - DNA, 20 bp, synthetic construct
  misc_feature 1..20: note = synthetic sequence
  source 1..20: mol_type = other DNA
gcctccagtctgaggatgag

SEQ ID NO: 241 - DNA, 20 bp, synthetic construct
  misc_feature 1..20: note = synthetic sequence
  source 1..20: mol_type = other DNA
ggctccggtccgaggatgag

SEQ ID NO: 242 - DNA, 20 bp, synthetic construct
  misc_feature 1..20: note = synthetic sequence
  source 1..20: mol_type = other DNA
ggctctagtctgaggatgag

SEQ ID NO: 243 - DNA, 20 bp, synthetic construct
  misc_feature 1..20: note = synthetic sequence
  source 1..20: mol_type = other DNA
ggctccagtctgaagatgag

SEQ ID NO: 244 - DNA, 20 bp, synthetic construct
  misc_feature 1..20: note = synthetic sequence
  source 1..20: mol_type = other DNA
gtgtgcagcctgaggacgag

SEQ ID NO: 245 - DNA, 20 bp, synthetic construct
  misc_feature 1..20: note = synthetic sequence
  source 1..20: mol_type = other DNA
gcctctagcctgaggacgag

SEQ ID NO: 246 - DNA, 20 bp, synthetic construct
  misc_feature 1..20: note = synthetic sequence
  source 1..20: mol_type = other DNA
gtgcgcagcctgaggatgag

SEQ ID NO: 247 - DNA, 20 bp, synthetic construct
  misc_feature 1..20: note = synthetic sequence
  source 1..20: mol_type = other DNA
ggctccaggctgaggacgag

SEQ ID NO: 248 - DNA, 20 bp, synthetic construct
  misc_feature 1..20: note = synthetic sequence
  source 1..20: mol_type = other DNA
gactccagcctgaggacgag

SEQ ID NO: 249 - DNA, 20 bp, synthetic construct
  misc_feature 1..20: note = synthetic sequence
  source 1..20: mol_type = other DNA
acctccagtctgaggatgag

SEQ ID NO: 250 - DNA, 20 bp, synthetic construct
  misc_feature 1..20: note = synthetic sequence
  source 1..20: mol_type = other DNA
ggctccaggctgaggatgag

SEQ ID NO: 251 - DNA, 20 bp, synthetic construct
  misc_feature 1..20: note = synthetic sequence
  source 1..20: mol_type = other DNA
gactccaggctgaggacgag

SEQ ID NO: 252 - DNA, 20 bp, synthetic construct
  misc_feature 1..20: note = synthetic sequence
  source 1..20: mol_type = other DNA
gggctcagactgaggacgag

SEQ ID NO: 253 - DNA, 20 bp, synthetic construct
  misc_feature 1..20: note = synthetic sequence
  source 1..20: mol_type = other DNA
ggctccagcctgaggatgag

SEQ ID NO: 254 - DNA, 20 bp, synthetic construct
  misc_feature 1..20: note = synthetic sequence
  source 1..20: mol_type = other DNA
gggtcctgaccgaagacgag

SEQ ID NO: 255 - DNA, 20 bp, synthetic construct
  misc_feature 1..20: note = synthetic sequence
  source 1..20: mol_type = other DNA
gcctctggcctgaggacgag

SEQ ID NO: 256 - DNA, 20 bp, synthetic construct
  misc_feature 1..20: note = synthetic sequence
  source 1..20: mol_type = other DNA
gcctctggcctgaggactag

SEQ ID NO: 257 - DNA, 20 bp, synthetic construct
  misc_feature 1..20: note = synthetic sequence
  source 1..20: mol_type = other DNA
ggatcgaggctggggatgag

SEQ ID NO: 258 - DNA, 20 bp, synthetic construct
  misc_feature 1..20: note = synthetic sequence
  source 1..20: mol_type = other DNA
gggcccaggtggaggatgaa

SEQ ID NO: 259 - DNA, 20 bp, synthetic construct
  misc_feature 1..20: note = synthetic sequence
  source 1..20: mol_type = other DNA
ggctcaagtccgaggttgag

SEQ ID NO: 260 - DNA, 20 bp, synthetic construct
  misc_feature 1..20: note = synthetic sequence
  source 1..20: mol_type = other DNA
gcctccagaccaaggacaag

SEQ ID NO: 261 - DNA, 20 bp, synthetic construct
  misc_feature 1..20: note = synthetic sequence
  source 1..20: mol_type = other DNA
ggctccagcctgaggacgag

SEQ ID NO: 262 - DNA, 20 bp, synthetic construct
  misc_feature 1..20: note = synthetic sequence
  source 1..20: mol_type = other DNA
gggcccaggttgaggatgag

SEQ ID NO: 263 - DNA, 20 bp, synthetic construct
  misc_feature 1..20: note = synthetic sequence
  source 1..20: mol_type = other DNA
gggtcctgaccaaaggcggg

SEQ ID NO: 264 - DNA, 20 bp, synthetic construct
  misc_feature 1..20: note = synthetic sequence
  source 1..20: mol_type = other DNA
acctccagtctgacgatgag

SEQ ID NO: 265 - DNA, 20 bp, synthetic construct
  misc_feature 1..20: note = synthetic sequence
  source 1..20: mol_type = other DNA
agctgcagcctgaggacgag

SEQ ID NO: 266 - DNA, 20 bp, synthetic construct
  misc_feature 1..20: note = synthetic sequence
  source 1..20: mol_type = other DNA
ggacccaggctatggatgag

SEQ ID NO: 267 - DNA, 20 bp, synthetic construct
  misc_feature 1..20: note = synthetic sequence
  source 1..20: mol_type = other DNA
gactccagactggggacgag

SEQ ID NO: 268 - DNA, 20 bp, synthetic construct
  misc_feature 1..20: note = synthetic sequence
  source 1..20: mol_type = other DNA
acatccaggaagaagatgag

SEQ ID NO: 269 - DNA, 20 bp, synthetic construct
  misc_feature 1..20: note = synthetic sequence
  source 1..20: mol_type = other DNA
ggattcaggttgaagacaag

SEQ ID NO: 270 - DNA, 20 bp, synthetic construct
  misc_feature 1..20: note = synthetic sequence
  source 1..20: mol_type = other DNA
gggtcgaagccggggatgag

SEQ ID NO: 271 - DNA, 20 bp, synthetic construct
  misc_feature 1..20: note = synthetic sequence
  source 1..20: mol_type = other DNA
gagtccaggcagaagatgag

SEQ ID NO: 272 - DNA, 20 bp, synthetic construct
  misc_feature 1..20: note = synthetic sequence
  source 1..20: mol_type = other DNA
acatccaggaagaggatgag

SEQ ID NO: 273 - DNA, 20 bp, synthetic construct
  misc_feature 1..20: note = synthetic sequence
  source 1..20: mol_type = other DNA
gggctcaggttgaacatgaa

SEQ ID NO: 274 - DNA, 20 bp, synthetic construct
  misc_feature 1..20: note = synthetic sequence
  source 1..20: mol_type = other DNA
gggctcaggcggaagatgag

SEQ ID NO: 275 - DNA, 22 bp, synthetic construct
  misc_feature 1..22: note = synthetic sequence
  modified_base 16: mod_base = OTHER; note = uracil
  modified_base 19: mod_base = OTHER; note = uracil
  source 1..22: mol_type = other DNA
gacggagaccaaggatgttgga

SEQ ID NO: 276 - DNA, 22 bp, synthetic construct
  misc_feature 1..22: note = synthetic sequence
  modified_base 10: mod_base = OTHER; note = uracil
  modified_base 19: mod_base = OTHER; note = uracil
  source 1..22: mol_type = other DNA
ggtggaggctgaggatgttgga

SEQ ID NO: 277 - DNA, 22 bp, synthetic construct
  misc_feature 1..22: note = synthetic sequence
  modified_base 10: mod_base = OTHER; note = uracil
  modified_base 19: mod_base = OTHER; note = uracil
  source 1..22: mol_type = other DNA
ggtagaggctgaggacgttggg

SEQ ID NO: 278 - DNA, 22 bp, synthetic construct
  misc_feature 1..22: note = synthetic sequence
  modified_base 10: mod_base = OTHER; note = uracil
  modified_base 19: mod_base = OTHER; note = uracil
  source 1..22: mol_type = other DNA
ggtggaggctgaggattttgga

SEQ ID NO: 279 - DNA, 22 bp, synthetic construct
  misc_feature 1..22: note = synthetic sequence
  modified_base 10: mod_base = OTHER; note = uracil
  modified_base 19: mod_base = OTHER; note = uracil
  source 1..22: mol_type = other DNA
ggtggaggctgaggatgttggg

SEQ ID NO: 280 - DNA, 22 bp, synthetic construct
  misc_feature 1..22: note = synthetic sequence
  modified_base 10: mod_base = OTHER; note = uracil
  modified_base 19: mod_base = OTHER; note = uracil
  source 1..22: mol_type = other DNA
gacggagactaaggatgttgga

SEQ ID NO: 281 - DNA, 22 bp, synthetic construct
  misc_feature 1..22: note = synthetic sequence
  modified_base 10: mod_base = OTHER; note = uracil
  modified_base 19: mod_base = OTHER; note = uracil
  source 1..22: mol_type = other DNA
agtggaggctgaggatgttggg

SEQ ID NO: 282 - DNA, 22 bp, synthetic construct
  misc_feature 1..22: note = synthetic sequence
  modified_base 10: mod_base = OTHER; note = uracil
  modified_base 18: mod_base = OTHER; note = uracil
  source 1..22: mol_type = other DNA
ggtggaagctgaggatgtcggg

SEQ ID NO: 283 - DNA, 22 bp, synthetic construct
  misc_feature 1..22: note = synthetic sequence
  modified_base 10: mod_base = OTHER; note = uracil
  modified_base 19: mod_base = OTHER; note = uracil
  source 1..22: mol_type = other DNA
gatggatgctgaggatgttggg

SEQ ID NO: 284 - DNA, 22 bp, synthetic construct
  misc_feature 1..22: note = synthetic sequence
  modified_base 10: mod_base = OTHER; note = uracil
  modified_base 19: mod_base = OTHER; note = uracil
  source 1..22: mol_type = other DNA
ggtggaggctgaggatattcga

SEQ ID NO: 285 - DNA, 20 bp, synthetic construct
  misc_feature 1..20: note = synthetic sequence
  source 1..20: mol_type = other DNA
gagcccaagccggggatgag

SEQ ID NO: 286 - DNA, 20 bp, synthetic construct
  misc_feature 1..20: note = synthetic sequence
  source 1..20: mol_type = other DNA
gagcccaggctggggacgag

SEQ ID NO: 287 - DNA, 20 bp, synthetic construct
  misc_feature 1..20: note = synthetic sequence
  source 1..20: mol_type = other DNA
gggcccaggcagatgatgaa

SEQ ID NO: 288 - DNA, 20 bp, synthetic construct
  misc_feature 1..20: note = synthetic sequence
  source 1..20: mol_type = other DNA
gagtccaggcagaagacgag

SEQ ID NO: 289 - DNA, 20 bp, synthetic construct
  misc_feature 1..20: note = synthetic sequence
  source 1..20: mol_type = other DNA
gactgaagactgaggacgag

SEQ ID NO: 290 - DNA, 20 bp, synthetic construct
  misc_feature 1..20: note = synthetic sequence
  source 1..20: mol_type = other DNA
caatcccgtctgaggatgga

SEQ ID NO: 291 - DNA, 20 bp, synthetic construct
  misc_feature 1..20: note = synthetic sequence
  source 1..20: mol_type = other DNA
ggctctgggctgaggacaag

SEQ ID NO: 292 - DNA, 20 bp, synthetic construct
  misc_feature 1..20: note = synthetic sequence
  source 1..20: mol_type = other DNA
atgggggcacaggatggaaa

SEQ ID NO: 293 - DNA, 19 bp, synthetic construct
  misc_feature 1..19: note = synthetic sequence
  source 1..19: mol_type = other DNA
atggggcacaggatggaaa

SEQ ID NO: 294 - DNA, 18 bp, synthetic construct
  misc_feature 1..18: note = synthetic sequence
  source 1..18: mol_type = other DNA
acagggcccaggctggga

SEQ ID NO: 295 - DNA, 20 bp, synthetic construct
  misc_feature 1..20: note = synthetic sequence
  source 1..20: mol_type = other DNA
ctgagcagcctgagatcaag

SEQ ID NO: 296 - DNA, 19 bp, synthetic construct
  misc_feature 1..19: note = synthetic sequence
  source 1..19: mol_type = other DNA
acagggcccaggctgggga

SEQ ID NO: 297 - DNA, 19 bp, synthetic construct
  misc_feature 1..19: note = synthetic sequence
  source 1..19: mol_type = other DNA
atgggccccaggctggaaa

SEQ ID NO: 298 - DNA, 19 bp, synthetic construct
  misc_feature 1..19: note = synthetic sequence
  source 1..19: mol_type = other DNA
gtggggcccaggccaggga

SEQ ID NO: 299 - DNA, 20 bp, synthetic construct
  misc_feature 1..20: note = synthetic sequence
  source 1..20: mol_type = other DNA
tgtgcagcccgagaggtgaa

SEQ ID NO: 300 - DNA, 20 bp, synthetic construct
  misc_feature 1..20: note = synthetic sequence
  modified_base 9: mod_base = OTHER; note = uracil
  modified_base 17: mod_base = OTHER; note = uracil
  source 1..20: mol_type = other DNA
gactccagtctgaggatgag

SEQ ID NO: 301 - DNA, 20 bp, synthetic construct
  misc_feature 1..20: note = synthetic sequence
  modified_base 9: mod_base = OTHER; note = uracil
  modified_base 17: mod_base = OTHER; note = uracil
  source 1..20: mol_type = other DNA
ggctccagtctgaggatgag

SEQ ID NO: 302 - DNA, 20 bp, synthetic construct
  misc_feature 1..20: note = synthetic sequence
  modified_base 9: mod_base = OTHER; note = uracil
  modified_base 17: mod_base = OTHER; note = uracil
  source 1..20: mol_type = other DNA
acctccagttagaggatgag

SEQ ID NO: 303 - DNA, 20 bp, synthetic construct
  misc_feature 1..20: note = synthetic sequence
  modified_base 9: mod_base = OTHER; note = uracil
  modified_base 17: mod_base = OTHER; note = uracil
  source 1..20: mol_type = other DNA
acctccagtttgaggatgag

SEQ ID NO: 304 - DNA, 20 bp, synthetic construct
  misc_feature 1..20: note = synthetic sequence
  modified_base 11: mod_base = OTHER; note = uracil
  modified_base 17: mod_base = OTHER; note = uracil
  source 1..20: mol_type = other DNA
gggcccaggctgaggatgag

SEQ ID NO: 305 - DNA, 20 bp, synthetic construct
  misc_feature 1..20: note = synthetic sequence
  modified_base 9: mod_base = OTHER; note = uracil
  modified_base 17: mod_base = OTHER; note = uracil
  source 1..20: mol_type = other DNA
gcctccagtctgaggatgag

SEQ ID NO: 306 - DNA, 20 bp, synthetic construct
  misc_feature 1..20: note = synthetic sequence
  modified_base 9: mod_base = OTHER; note = uracil
  modified_base 17: mod_base = OTHER; note = uracil
  source 1..20: mol_type = other DNA
ggctccggtccgaggatgag

SEQ ID NO: 307 - DNA, 20 bp, synthetic construct
  misc_feature 1..20: note = synthetic sequence
  modified_base 9: mod_base = OTHER; note = uracil
  modified_base 17: mod_base = OTHER; note = uracil
  source 1..20: mol_type = other DNA
ggctctagtctgaggatgag

SEQ ID NO: 308 - DNA, 20 bp, synthetic construct
  misc_feature 1..20: note = synthetic sequence
  modified_base 9: mod_base = OTHER; note = uracil
  modified_base 17: mod_base = OTHER; note = uracil
  source 1..20: mol_type = other DNA
ggctccagtctgaagatgag

SEQ ID NO: 309 - DNA, 20 bp, synthetic construct
  misc_feature 1..20: note = synthetic sequence
  modified_base 2: mod_base = OTHER; note = uracil
  modified_base 11: mod_base = OTHER; note = uracil
  source 1..20: mol_type = other DNA
gtgtgcagcctgaggacgag

SEQ ID NO: 310 - DNA, 20 bp, synthetic construct
  misc_feature 1..20: note = synthetic sequence
  modified_base 4: mod_base = OTHER; note = uracil
  modified_base 11: mod_base = OTHER; note = uracil
  source 1..20: mol_type = other DNA
gcctctagcctgaggacgag

SEQ ID NO: 311 - DNA, 20 bp, synthetic construct
  misc_feature 1..20: note = synthetic sequence
  modified_base 11: mod_base = OTHER; note = uracil
  modified_base 17: mod_base = OTHER; note = uracil
  source 1..20: mol_type = other DNA
gtgcgcagcctgaggatgag

SEQ ID NO: 312 - DNA, 20 bp, synthetic construct
  misc_feature 1..20: note = synthetic sequence
  modified_base 4: mod_base = OTHER; note = uracil
  modified_base 11: mod_base = OTHER; note = uracil
  source 1..20: mol_type = other DNA
ggctccaggctgaggacgag

SEQ ID NO: 313 - DNA, 20 bp, synthetic construct
  misc_feature 1..20: note = synthetic sequence
  modified_base 4: mod_base = OTHER; note = uracil
  modified_base 11: mod_base = OTHER; note = uracil
  source 1..20: mol_type = other DNA
gactccagcctgaggacgag

SEQ ID NO: 314 - DNA, 20 bp, synthetic construct
  misc_feature 1..20: note = synthetic sequence
  modified_base 9: mod_base = OTHER; note = uracil
  modified_base 17: mod_base = OTHER; note = uracil
  source 1..20: mol_type = other DNA
acctccagtctgaggatgag

SEQ ID NO: 315 - DNA, 20 bp, synthetic construct
  misc_feature 1..20: note = synthetic sequence
  modified_base 11: mod_base = OTHER; note = uracil
  modified_base 17: mod_base = OTHER; note = uracil
  source 1..20: mol_type = other DNA
ggctccaggctgaggatgag

SEQ ID NO: 316 - DNA, 20 bp, synthetic construct
  misc_feature 1..20: note = synthetic sequence
  modified_base 4: mod_base = OTHER; note = uracil
  modified_base 11: mod_base = OTHER; note = uracil
  source 1..20: mol_type = other DNA
gactccaggctgaggacgag

SEQ ID NO: 317 - DNA, 20 bp, synthetic construct
  misc_feature 1..20: note = synthetic sequence
  modified_base 5: mod_base = OTHER; note = uracil
  modified_base 11: mod_base = OTHER; note = uracil
  source 1..20: mol_type = other DNA
gggctcagactgaggacgag

SEQ ID NO: 318 - DNA, 20 bp, synthetic construct
  misc_feature 1..20: note = synthetic sequence
  modified_base 11: mod_base = OTHER; note = uracil
  modified_base 17: mod_base = OTHER; note = uracil
  source 1..20: mol_type = other DNA
ggctccagcctgaggatgag

SEQ ID NO: 319 - DNA, 20 bp, synthetic construct
  misc_feature 1..20: note = synthetic sequence
  modified_base 4: mod_base = OTHER; note = uracil
  modified_base 7: mod_base = OTHER; note = uracil
  source 1..20: mol_type = other DNA
gggtcctgaccgaagacgag

SEQ ID NO: 320 - DNA, 20 bp, synthetic construct
  misc_feature 1..20: note = synthetic sequence
  modified_base 4: mod_base = OTHER; note = uracil
  modified_base 11: mod_base = OTHER; note = uracil
  source 1..20: mol_type = other DNA
gcctctggcctgaggacgag

SEQ ID NO: 321 - DNA, 20 bp, synthetic construct
  misc_feature 1..20: note = synthetic sequence
  modified_base 11: mod_base = OTHER; note = uracil
  modified_base 18: mod_base = OTHER; note = uracil
  source 1..20: mol_type = other DNA
gcctctggcctgaggactag

SEQ ID NO: 322 - DNA, 20 bp, synthetic construct
  misc_feature 1..20: note = synthetic sequence
  modified_base 11: mod_base = OTHER; note = uracil
  modified_base 17: mod_base = OTHER; note = uracil
  source 1..20: mol_type = other DNA
ggatcgaggctggggatgag

SEQ ID NO: 323 - DNA, 20 bp, synthetic construct
  misc_feature 1..20: note = synthetic sequence
  modified_base 10: mod_base = OTHER; note = uracil
  modified_base 17: mod_base = OTHER; note = uracil
  source 1..20: mol_type = other DNA
gggcccaggtggaggatgaa

SEQ ID NO: 324 - DNA, 20 bp, synthetic construct
  misc_feature 1..20: note = synthetic sequence
  modified_base 9: mod_base = OTHER; note = uracil
  modified_base 17: mod_base = OTHER; note = uracil
  source 1..20: mol_type = other DNA
ggctcaagtccgaggttgag

SEQ ID NO: 325 - DNA, 20 bp, synthetic construct
  misc_feature 1..20: note = synthetic sequence
  source 1..20: mol_type = other DNA
gcctccagaccaaggacaag

SEQ ID NO: 326 - DNA, 20 bp, synthetic construct
  misc_feature 1..20: note = synthetic sequence
  modified_base 4: mod_base = OTHER; note = uracil
  modified_base 11: mod_base = OTHER; note = uracil
  source 1..20: mol_type = other DNA
ggctccagcctgaggacgag

SEQ ID NO: 327 - DNA, 20 bp, synthetic construct
  misc_feature 1..20: note = synthetic sequence
  modified_base 10: mod_base = OTHER; note = uracil
  modified_base 17: mod_base = OTHER; note = uracil
  source 1..20: mol_type = other DNA
gggcccaggttgaggatgag

SEQ ID NO: 328 - DNA, 20 bp, synthetic construct
  misc_feature 1..20: note = synthetic sequence
  modified_base 4: mod_base = OTHER; note = uracil
  modified_base 7: mod_base = OTHER; note = uracil
  source 1..20: mol_type = other DNA
gggtcctgaccaaaggcggg

SEQ ID NO: 329 - DNA, 20 bp, synthetic construct
  misc_feature 1..20: note = synthetic sequence
  modified_base 9: mod_base = OTHER; note = uracil
  modified_base 17: mod_base = OTHER; note = uracil
  source 1..20: mol_type = other DNA
acctccagtctgacgatgag

SEQ ID NO: 330 - DNA, 20 bp, synthetic construct
  misc_feature 1..20: note = synthetic sequence
  modified_base 4: mod_base = OTHER; note = uracil
  modified_base 11: mod_base = OTHER; note = uracil
  source 1..20: mol_type = other DNA
agctgcagcctgaggacgag

SEQ ID NO: 331 - DNA, 20 bp, synthetic construct
  misc_feature 1..20: note = synthetic sequence
  modified_base 11: mod_base = OTHER; note = uracil
  modified_base 17: mod_base = OTHER; note = uracil
  source 1..20: mol_type = other DNA
ggacccaggctatggatgag

SEQ ID NO: 332 - DNA, 20 bp, synthetic construct
  misc_feature 1..20: note = synthetic sequence
  modified_base 4: mod_base = OTHER; note = uracil
  modified_base 11: mod_base = OTHER; note = uracil
  source 1..20: mol_type = other DNA
gactccagactggggacgag

SEQ ID NO: 333 - DNA, 20 bp, synthetic construct
  misc_feature 1..20: note = synthetic sequence
  modified_base 4: mod_base = OTHER; note = uracil
  modified_base 17: mod_base = OTHER; note = uracil
  source 1..20: mol_type = other DNA
acatccaggaagaagatgag

SEQ ID NO: 334 - DNA, 20 bp, synthetic construct
  misc_feature 1..20: note = synthetic sequence
  modified_base 4: mod_base = OTHER; note = uracil
  modified_base 11: mod_base = OTHER; note = uracil
  source 1..20: mol_type = other DNA
ggattcaggttgaagacaag

SEQ ID NO: 335 - DNA, 20 bp, synthetic construct
  misc_feature 1..20: note = synthetic sequence
  modified_base 4: mod_base = OTHER; note = uracil
  modified_base 17: mod_base = OTHER; note = uracil
  source 1..20: mol_type = other DNA
gggtcgaagccggggatgag

SEQ ID NO: 336 - DNA, 20 bp, synthetic construct
  misc_feature 1..20: note = synthetic sequence
  modified_base 4: mod_base = OTHER; note = uracil
  modified_base 17: mod_base = OTHER; note = uracil
  source 1..20: mol_type = other DNA
gagtccaggcagaagatgag

SEQ ID NO: 337 - DNA, 20 bp, synthetic construct
  misc_feature 1..20: note = synthetic sequence
  modified_base 4: mod_base = OTHER; note = uracil
  modified_base 17: mod_base = OTHER; note = uracil
  source 1..20: mol_type = other DNA
acatccaggaagaggatgag

SEQ ID NO: 338 - DNA, 20 bp, synthetic construct
  misc_feature 1..20: note = synthetic sequence
  modified_base 5: mod_base = OTHER; note = uracil
  modified_base 17: mod_base = OTHER; note = uracil
  source 1..20: mol_type = other DNA
gggctcaggttgaacatgaa

SEQ ID NO: 339 - DNA, 20 bp, synthetic construct
  misc_feature 1..20: note = synthetic sequence
  modified_base 5: mod_base = OTHER; note = uracil
  modified_base 17: mod_base = OTHER; note = uracil
  source 1..20: mol_type = other DNA
gggctcaggcggaagatgag

SEQ ID NO: 340 - DNA, 20 bp, synthetic construct
  misc_feature 1..20: note = synthetic sequence
  source 1..20: mol_type = other DNA
gagcccaagccggggatgag

SEQ ID NO: 341 - DNA, 20 bp, synthetic construct
  misc_feature 1..20: note = synthetic sequence
  source 1..20: mol_type = other DNA
gagcccaggctggggacgag

SEQ ID NO: 342 - DNA, 20 bp, synthetic construct
  misc_feature 1..20: note = synthetic sequence
  modified_base 14: mod_base = OTHER; note = uracil
  modified_base 17: mod_base = OTHER; note = uracil
  source 1..20: mol_type = other DNA
gggcccaggcagatgatgaa

SEQ ID NO: 343 - DNA, 20 bp, synthetic construct
  misc_feature 1..20: note = synthetic sequence
  source 1..20: mol_type = other DNA
gagtccaggcagaagacgag

SEQ ID NO: 344 - DNA, 20 bp, synthetic construct
  misc_feature 1..20: note = synthetic sequence
  modified_base 4: mod_base = OTHER; note = uracil
  modified_base 11: mod_base = OTHER; note = uracil
  source 1..20: mol_type = other DNA
gactgaagactgaggacgag

SEQ ID NO: 345 - DNA, 20 bp, synthetic construct
  misc_feature 1..20: note = synthetic sequence
  modified_base 9: mod_base = OTHER; note = uracil
  modified_base 17: mod_base = OTHER; note = uracil
  source 1..20: mol_type = other DNA
caatcccgtctgaggatgga

SEQ ID NO: 346 - DNA, 20 bp, synthetic construct
  misc_feature 1..20: note = synthetic sequence
  modified_base 4: mod_base = OTHER; note = uracil
  modified_base 11: mod_base = OTHER; note = uracil
  source 1..20: mol_type = other DNA
ggctctgggctgaggacaag

SEQ ID NO: 347 - DNA, 20 bp, synthetic construct
  misc_feature 1..20: note = synthetic sequence
  modified_base 2: mod_base = OTHER; note = uracil
  modified_base 15: mod_base = OTHER; note = uracil
  source 1..20: mol_type = other DNA
atgggggcacaggatggaaa

SEQ ID NO: 348 - DNA, 19 bp, synthetic construct
  misc_feature 1..19: note = synthetic sequence
  modified_base 2: mod_base = OTHER; note = uracil
  modified_base 14: mod_base = OTHER; note = uracil
  source 1..19: mol_type = other DNA
atggggcacaggatggaaa

SEQ ID NO: 349 - DNA, 18 bp, synthetic construct
  misc_feature 1..18: note = synthetic sequence
  source 1..18: mol_type = other DNA
acagggcccaggctggga

SEQ ID NO: 350 - DNA, 20 bp, synthetic construct
  misc_feature 1..20: note = synthetic sequence
  modified_base 11: mod_base = OTHER; note = uracil
  modified_base 16: mod_base = OTHER; note = uracil
  source 1..20: mol_type = other DNA
ctgagcagcctgagatcaag

SEQ ID NO: 351 - DNA, 19 bp, synthetic construct
  misc_feature 1..19: note = synthetic sequence
  source 1..19: mol_type = other DNA
acagggcccaggctgggga

SEQ ID NO: 352 - DNA, 19 bp, synthetic construct
  misc_feature 1..19: note = synthetic sequence
  modified_base 2: mod_base = OTHER; note = uracil
  modified_base 14: mod_base = OTHER; note = uracil
  source 1..19: mol_type = other DNA
atgggccccaggctggaaa

SEQ ID NO: 353 - DNA, 19 bp, synthetic construct
  misc_feature 1..19: note = synthetic sequence
  source 1..19: mol_type = other DNA
gtggggcccaggccaggga

SEQ ID NO: 354 - DNA, 20 bp, synthetic construct
  misc_feature 1..20: note = synthetic sequence
  modified_base 3: mod_base = OTHER; note = uracil
  modified_base 17: mod_base = OTHER; note = uracil
  source 1..20: mol_type = other DNA
tgtgcagcccgagaggtgaa

SEQ ID NO: 355 - DNA, 24 bp, synthetic construct
  misc_feature 1..24: note = synthetic sequence
  source 1..24: mol_type = other DNA
tccgaggatgaggctgattattac

SEQ ID NO: 356 - DNA, 24 bp, synthetic construct
  misc_feature 1..24: note = synthetic sequence
  source 1..24: mol_type = other DNA
gctgaggacgaggctgattattag

SEQ ID NO: 357 - DNA, 24 bp, synthetic construct
  misc_feature 1..24: note = synthetic sequence
  source 1..24: mol_type = other DNA
ttagaggatgaggctgattattac

SEQ ID NO: 358 - DNA, 24 bp, synthetic construct
  misc_feature 1..24: note = synthetic sequence
  source 1..24: mol_type = other DNA
tttgaggatgaggctgattattac

SEQ ID NO: 359 - DNA, 24 bp, synthetic construct
  misc_feature 1..24: note = synthetic sequence
  source 1..24: mol_type = other DNA
cctgaggacgaggctgactattac

SEQ ID NO: 360 - DNA, 24 bp, synthetic construct
  misc_feature 1..24: note = synthetic sequence
  source 1..24: mol_type = other DNA
gctgaggatgaggctgattattac

SEQ ID NO: 361 - DNA, 24 bp, synthetic construct
  misc_feature 1..24: note = synthetic sequence
  source 1..24: mol_type = other DNA
cctgaggatgaggctgagtattac

SEQ ID NO: 362 - DNA, 24 bp, synthetic construct
  misc_feature 1..24: note = synthetic sequence
  source 1..24: mol_type = other DNA
cctgaggacgaggctgattattac

SEQ ID NO: 363 - DNA, 24 bp, synthetic construct
  misc_feature 1..24: note = synthetic sequence
  source 1..24: mol_type = other DNA
cctgaggatgaggctgactattac

SEQ ID NO: 364 - DNA, 24 bp, synthetic construct
  misc_feature 1..24: note = synthetic sequence
  source 1..24: mol_type = other DNA
tctgaggatgaggctgactattac

SEQ ID NO: 365 - DNA, 24 bp, synthetic construct
  misc_feature 1..24: note = synthetic sequence
  source 1..24: mol_type = other DNA
cctgaggacgaggctgagtattac

SEQ ID NO: 366 - DNA, 24 bp, synthetic construct
  misc_feature 1..24: note = synthetic sequence
  source 1..24: mol_type = other DNA
tctgaggatgaggctgattattac

SEQ ID NO: 367 - DNA, 24 bp, synthetic construct
  misc_feature 1..24: note = synthetic sequence
  source 1..24: mol_type = other DNA
gctgaggacgaggctgattattac

SEQ ID NO: 368 - DNA, 24 bp, synthetic construct
  misc_feature 1..24: note = synthetic sequence
  source 1..24: mol_type = other DNA
tctgaagatgaggctgactattac

SEQ ID NO: 369 - DNA, 24 bp, synthetic construct
  misc_feature 1..24: note = synthetic sequence
  source 1..24: mol_type = other DNA
actgaggacgaggctgactattac

SEQ ID NO: 370 - DNA, 24 bp, synthetic construct
  misc_feature 1..24: note = synthetic sequence
  source 1..24: mol_type = other DNA
cctgaggactaggccgattattac

SEQ ID NO: 371 - DNA, 24 bp, synthetic construct
  misc_feature 1..24: note = synthetic sequence
  source 1..24: mol_type = other DNA
gttgaagacaaggctgactattac

SEQ ID NO: 372 - DNA, 24 bp, synthetic construct
  misc_feature 1..24: note = synthetic sequence
  source 1..24: mol_type = other DNA
actggggacgaggccgattattac

SEQ ID NO: 373 - DNA, 24 bp, synthetic construct
  misc_feature 1..24: note = synthetic sequence
  source 1..24: mol_type = other DNA
gctggggatgaggctgactattac

SEQ ID NO: 374 - DNA, 24 bp, synthetic construct
  misc_feature 1..24: note = synthetic sequence
  source 1..24: mol_type = other DNA
gccggggatgaggccgactattac

SEQ ID NO: 375 - DNA, 24 bp, synthetic construct
  misc_feature 1..24: note = synthetic sequence
  source 1..24: mol_type = other DNA
gttgaggatgaggctgactattac

SEQ ID NO: 376 - DNA, 24 bp, synthetic construct
  misc_feature 1..24: note = synthetic sequence
  source 1..24: mol_type = other DNA
gctgaggacaagactgattatcac

SEQ ID NO: 377 - DNA, 24 bp, synthetic construct
  misc_feature 1..24: note = synthetic sequence
  source 1..24: mol_type = other DNA
tctgacgatgaggctgagtatcac

SEQ ID NO: 378 - DNA, 24 bp, synthetic construct
  misc_feature 1..24: note = synthetic sequence
  source 1..24: mol_type = other DNA
accgaagacgaggctgactattac

SEQ ID NO: 379 - DNA, 24 bp, synthetic construct
  misc_feature 1..24: note = synthetic sequence
  source 1..24: mol_type = other DNA
tccgaggttgaggctaattatcac

SEQ ID NO: 380 - DNA, 24 bp, synthetic construct
  misc_feature 1..24: note = synthetic sequence
  source 1..24: mol_type = other DNA
gtggaggatgaagatgactactac

SEQ ID NO: 381 - DNA, 24 bp, synthetic construct
  misc_feature 1..24: note = synthetic sequence
  source 1..24: mol_type = other DNA
cctgaggacgaggctatgtattac

SEQ ID NO: 382 - DNA, 24 bp, synthetic construct
  misc_feature 1..24: note = synthetic sequence
  source 1..24: mol_type = other DNA
accaaggacaagcctgcctattac

SEQ ID NO: 383 - DNA, 24 bp, synthetic construct
  misc_feature 1..24: note = synthetic sequence
  source 1..24: mol_type = other DNA
gttgaacatgaagctgactattac

SEQ ID NO: 384 - DNA, 24 bp, synthetic construct
  misc_feature 1..24: note = synthetic sequence
  source 1..24: mol_type = other DNA
tctgaggatggagctgactatatc

SEQ ID NO: 385 - DNA, 24 bp, synthetic construct
  misc_feature 1..24: note = synthetic sequence
  source 1..24: mol_type = other DNA
gaagaagatgagagtgactaccac

SEQ ID NO: 386 - DNA, 24 bp, synthetic construct
  misc_feature 1..24: note = synthetic sequence
  source 1..24: mol_type = other DNA
gccggggatgaggctgactattac

SEQ ID NO: 387 - DNA, 24 bp, synthetic construct
  misc_feature 1..24: note = synthetic sequence
  source 1..24: mol_type = other DNA
gctatggatgaggctgactattac

SEQ ID NO: 388 - DNA, 23 bp, synthetic construct
  misc_feature 1..23: note = synthetic sequence
  source 1..23: mol_type = other DNA
gcagatgatgaactgattattac

SEQ ID NO: 389 - DNA, 24 bp, synthetic construct
  misc_feature 1..24: note = synthetic sequence
  source 1..24: mol_type = other DNA
gtggaggatgaagctgactactac

SEQ ID NO: 390 - DNA, 24 bp, synthetic construct
  misc_feature 1..24: note = synthetic sequence
  source 1..24: mol_type = other DNA
actgaggacgaggctgactactac

SEQ ID NO: 391 - DNA, 24 bp, synthetic construct
  misc_feature 1..24: note = synthetic sequence
  source 1..24: mol_type = other DNA
accaaaggcggggctgactattac

SEQ ID NO: 392 - DNA, 24 bp, synthetic construct
  misc_feature 1..24: note = synthetic sequence
  source 1..24: mol_type = other DNA
gcagatgatgaatctgattattac

SEQ ID NO: 393 - DNA, 22 bp, synthetic construct
  misc_feature 1..22: note = synthetic sequence
  source 1..22: mol_type = other DNA
gctggggacgaggctttcctct

SEQ ID NO: 394 - DNA, 24 bp, synthetic construct
  misc_feature 1..24: note = synthetic sequence
  source 1..24: mol_type = other DNA
gcagaagatgaggctgactattac

SEQ ID NO: 395 - DNA, 24 bp, synthetic construct
  misc_feature 1..24: note = synthetic sequence
  source 1..24: mol_type = other DNA
gaagaggatgagagtgactaccac

SEQ ID NO: 396 - DNA, 24 bp, synthetic construct
  misc_feature 1..24: note = synthetic sequence
  source 1..24: mol_type = other DNA
gcggaagatgaggctgactattac

SEQ ID NO: 397 - DNA, 24 bp, synthetic construct
  misc_feature 1..24: note = synthetic sequence
  source 1..24: mol_type = other DNA
cctgaggacgaggccgattattac

SEQ ID NO: 398 - DNA, 24 bp, synthetic construct
  misc_feature 1..24: note = synthetic sequence
  source 1..24: mol_type = other DNA
gcagaagacgaggctgactattac

SEQ ID NO: 399 - DNA, 24 bp, synthetic construct
  misc_feature 1..24: note = synthetic sequence
  source 1..24: mol_type = other DNA
acaggatggaaacaaggctattac

SEQ ID NO: 400 - DNA, 24 bp, synthetic construct
  misc_feature 1..24: note = synthetic sequence
  source 1..24: mol_type = other DNA
ccaggctggaaacaaggctattac

SEQ ID NO: 401 - DNA, 24 bp, synthetic construct
  misc_feature 1..24: note = synthetic sequence
  source 1..24: mol_type = other DNA
ccaggccagggacgaggctattac

SEQ ID NO: 402 - DNA, 24 bp, synthetic construct
  misc_feature 1..24: note = synthetic sequence
  source 1..24: mol_type = other DNA
ccaggctggggaccaggctattac

SEQ ID NO: 403 - DNA, 24 bp, synthetic construct
  misc_feature 1..24: note = synthetic sequence
  source 1..24: mol_type = other DNA
cctgagatcaagtccgactattac

SEQ ID NO: 404 - DNA, 23 bp, synthetic construct
  misc_feature 1..23: note = synthetic sequence
  source 1..23: mol_type = other DNA
ccaggctgggacgaggctattac

SEQ ID NO: 405 - DNA, 24 bp, synthetic construct
  misc_feature 1..24: note = synthetic sequence
  source 1..24: mol_type = other DNA
ccgagaggtgaagctgagtactac

SEQ ID NO: 406 - DNA, 24 bp, synthetic construct
  misc_feature 1..24: note = synthetic sequence
  modified_base 9: mod_base = OTHER; note = uracil
  modified_base 22: mod_base = OTHER; note = uracil
  source 1..24: mol_type = other DNA
tccgaggatgaggctgattattac

SEQ ID NO: 407 - DNA, 24 bp, synthetic construct
  misc_feature 1..24: note = synthetic sequence
  modified_base 15: mod_base = OTHER; note = uracil
  modified_base 22: mod_base = OTHER; note = uracil
  source 1..24: mol_type = other DNA
gctgaggacgaggctgattattag

SEQ ID NO: 408 - DNA, 24 bp, synthetic construct
  misc_feature 1..24: note = synthetic sequence
  modified_base 9: mod_base = OTHER; note = uracil
  modified_base 22: mod_base = OTHER; note = uracil
  source 1..24: mol_type = other DNA
ttagaggatgaggctgattattac

SEQ ID NO: 409 - DNA, 24 bp, synthetic construct
  misc_feature 1..24: note = synthetic sequence
  modified_base 9: mod_base = OTHER; note = uracil
  modified_base 22: mod_base = OTHER; note = uracil
  source 1..24: mol_type = other DNA
tttgaggatgaggctgattattac

SEQ ID NO: 410 - DNA, 24 bp, synthetic construct
  misc_feature 1..24: note = synthetic sequence
  modified_base 15: mod_base = OTHER; note = uracil
  modified_base 22: mod_base = OTHER; note = uracil
  source 1..24: mol_type = other DNA
cctgaggacgaggctgactattac

SEQ ID NO: 411 - DNA, 24 bp, synthetic construct
  misc_feature 1..24: note = synthetic sequence
  modified_base 9: mod_base = OTHER; note = uracil
  modified_base 22: mod_base = OTHER; note = uracil
  source 1..24: mol_type = other DNA
gctgaggatgaggctgattattac

SEQ ID NO: 412 - DNA, 24 bp, synthetic construct
  misc_feature 1..24: note = synthetic sequence
  modified_base 9: mod_base = OTHER; note = uracil
  modified_base 22: mod_base = OTHER; note = uracil
  source 1..24: mol_type = other DNA
cctgaggatgaggctgagtattac

SEQ ID NO: 413 - DNA, 24 bp, synthetic construct
  misc_feature 1..24: note = synthetic sequence
  modified_base 15: mod_base = OTHER; note = uracil
  modified_base 22: mod_base = OTHER; note = uracil
  source 1..24: mol_type = other DNA
cctgaggacgaggctgattattac

SEQ ID NO: 414 - DNA, 24 bp, synthetic construct
  misc_feature 1..24: note = synthetic sequence
  modified_base 9: mod_base = OTHER; note = uracil
  modified_base 22: mod_base = OTHER; note = uracil
  source 1..24: mol_type = other DNA
cctgaggatgaggctgactattac

SEQ ID NO: 415 - DNA, 24 bp, synthetic construct
  misc_feature 1..24: note = synthetic sequence
  modified_base 9: mod_base = OTHER; note = uracil
  modified_base 22: mod_base = OTHER; note = uracil
  source 1..24: mol_type = other DNA
tctgaggatgaggctgactattac

SEQ ID NO: 416 - DNA, 24 bp, synthetic construct
  misc_feature 1..24: note = synthetic sequence
  modified_base 15: mod_base = OTHER; note = uracil
  modified_base 22: mod_base = OTHER; note = uracil
  source 1..24: mol_type = other DNA
cctgaggacgaggctgagtattac

SEQ ID NO: 417 - DNA, 24 bp, synthetic construct
  misc_feature 1..24: note = synthetic sequence
  modified_base 9: mod_base = OTHER; note = uracil
  modified_base 22: mod_base = OTHER; note = uracil
  source 1..24: mol_type = other DNA
tctgaggatgaggctgattattac

SEQ ID NO: 418 - DNA, 24 bp, synthetic construct
  misc_feature 1..24: note = synthetic sequence
  modified_base 15: mod_base = OTHER; note = uracil
  modified_base 22: mod_base = OTHER; note = uracil
  source 1..24: mol_type = other DNA
gctgaggacgaggctgattattac

SEQ ID NO: 419 - DNA, 24 bp, synthetic construct
  misc_feature 1..24: note = synthetic sequence
  modified_base 9: mod_base = OTHER; note = uracil
  modified_base 22: mod_base = OTHER; note = uracil
  source 1..24: mol_type = other DNA
tctgaagatgaggctgactattac

SEQ ID NO: 420 - DNA, 24 bp, synthetic construct
  misc_feature 1..24: note = synthetic sequence
  modified_base 15: mod_base = OTHER; note = uracil
  modified_base 22: mod_base = OTHER; note = uracil
  source 1..24: mol_type = other DNA
actgaggacgaggctgactattac

SEQ ID NO: 421 - DNA, 24 bp, synthetic construct
  misc_feature 1..24: note = synthetic sequence
  modified_base 10: mod_base = OTHER; note = uracil
  modified_base 22: mod_base = OTHER; note = uracil
  source 1..24: mol_type = other DNA
cctgaggactaggccgattattac

SEQ ID NO: 422 - DNA, 24 bp, synthetic construct
  misc_feature 1..24: note = synthetic sequence
  modified_base 15: mod_base = OTHER; note = uracil
  modified_base 22: mod_base = OTHER; note = uracil
  source 1..24: mol_type = other DNA
gttgaagacaaggctgactattac

SEQ ID NO: 423 - DNA, 24 bp, synthetic construct
  misc_feature 1..24: note = synthetic sequence
  modified_base 3: mod_base = OTHER; note = uracil
  modified_base 22: mod_base = OTHER; note = uracil
  source 1..24: mol_type = other DNA
actggggacgaggccgattattac

SEQ ID NO: 424 - DNA, 24 bp, synthetic construct
  misc_feature 1..24: note = synthetic sequence
  modified_base 9: mod_base = OTHER; note = uracil
  modified_base 22: mod_base = OTHER; note = uracil
  source 1..24: mol_type = other DNA
gctggggatgaggctgactattac

SEQ ID NO: 425 - DNA, 24 bp, synthetic construct
  misc_feature 1..24: note = synthetic sequence
  modified_base 9: mod_base = OTHER; note = uracil
  modified_base 22: mod_base = OTHER; note = uracil
  source 1..24: mol_type = other DNA
gccggggatgaggccgactattac

SEQ ID NO: 426 - DNA, 24 bp, synthetic construct
  misc_feature 1..24: note = synthetic sequence
  modified_base 9: mod_base = OTHER; note = uracil
  modified_base 22: mod_base = OTHER; note = uracil
  source 1..24: mol_type = other DNA
gttgaggatgaggctgactattac

SEQ ID NO: 427 - DNA, 24 bp, synthetic construct
  misc_feature 1..24: note = synthetic sequence
  modified_base 15: mod_base = OTHER; note = uracil
  modified_base 21: mod_base = OTHER; note = uracil
  source 1..24: mol_type = other DNA
gctgaggacaagactgattatcac

SEQ ID NO: 428 - DNA, 24 bp, synthetic construct
  misc_feature 1..24: note = synthetic sequence
  modified_base 9: mod_base = OTHER; note = uracil
  modified_base 21: mod_base = OTHER; note = uracil
  source 1..24: mol_type = other DNA
tctgacgatgaggctgagtatcac

SEQ ID NO: 429 - DNA, 24 bp, synthetic construct
  misc_feature 1..24: note = synthetic sequence
  modified_base 15: mod_base = OTHER; note = uracil
  modified_base 22: mod_base = OTHER; note = uracil
  source 1..24: mol_type = other DNA
accgaagacgaggctgactattac

SEQ ID NO: 430 - DNA, 24 bp, synthetic construct
  misc_feature 1..24: note = synthetic sequence
  modified_base 9: mod_base = OTHER; note = uracil
  modified_base 21: mod_base = OTHER; note = uracil
  source 1..24: mol_type = other DNA
tccgaggttgaggctaattatcac

SEQ ID NO: 431 - DNA, 24 bp, synthetic construct
  misc_feature 1..24: note = synthetic sequence
  modified_base 9: mod_base = OTHER; note = uracil
  modified_base 22: mod_base = OTHER; note = uracil
  source 1..24: mol_type = other DNA
gtggaggatgaagatgactactac

SEQ ID NO: 432 - DNA, 24 bp, synthetic construct
  misc_feature 1..24: note = synthetic sequence
  modified_base 15: mod_base = OTHER; note = uracil
  modified_base 22: mod_base = OTHER; note = uracil
  source 1..24: mol_type = other DNA
cctgaggacgaggctatgtattac

SEQ ID NO: 433 - DNA, 24 bp, synthetic construct
  misc_feature 1..24: note = synthetic sequence
  modified_base 15: mod_base = OTHER; note = uracil
  modified_base 22: mod_base = OTHER; note = uracil
  source 1..24: mol_type = other DNA
accaaggacaagcctgcctattac

SEQ ID NO: 434 - DNA, 24 bp, synthetic construct
  misc_feature 1..24: note = synthetic sequence
  modified_base 9: mod_base = OTHER; note = uracil
  modified_base 22: mod_base = OTHER; note = uracil
  source 1..24: mol_type = other DNA
gttgaacatgaagctgactattac

SEQ ID NO: 435 - DNA, 24 bp, synthetic construct
  misc_feature 1..24: note = synthetic sequence
  modified_base 9: mod_base = OTHER; note = uracil
  modified_base 23: mod_base = OTHER; note = uracil
  source 1..24: mol_type = other DNA
tctgaggatggagctgactatatc

SEQ ID NO: 436 - DNA, 24 bp, synthetic construct
  misc_feature 1..24: note = synthetic sequence
  modified_base 9: mod_base = OTHER; note = uracil
  modified_base 19: mod_base = OTHER; note = uracil
  source 1..24: mol_type = other DNA
gaagaagatgagagtgactaccac

SEQ ID NO: 437 - DNA, 24 bp, synthetic construct
  misc_feature 1..24: note = synthetic sequence
  modified_base 9: mod_base = OTHER; note = uracil
  modified_base 22: mod_base = OTHER; note = uracil
  source 1..24: mol_type = other DNA
gccggggatgaggctgactattac

SEQ ID NO: 438 - DNA, 24 bp, synthetic construct
  misc_feature 1..24: note = synthetic sequence
  modified_base 9: mod_base = OTHER; note = uracil
  modified_base 22: mod_base = OTHER; note = uracil
  source 1..24: mol_type = other DNA
gctatggatgaggctgactattac

SEQ ID NO: 439 - DNA, 23 bp, synthetic construct
  misc_feature 1..23: note = synthetic sequence
  modified_base 9: mod_base = OTHER; note = uracil
  modified_base 21: mod_base = OTHER; note = uracil
  source 1..23: mol_type = other DNA
gcagatgatgaactgattattac

SEQ ID NO: 440 - DNA, 24 bp, synthetic construct
  misc_feature 1..24: note = synthetic sequence
  modified_base 9: mod_base = OTHER; note = uracil
  modified_base 22: mod_base = OTHER; note = uracil
  source 1..24: mol_type = other DNA
gtggaggatgaagctgactactac

SEQ ID NO: 441 - DNA, 24 bp, synthetic construct
  misc_feature 1..24: note = synthetic sequence
  modified_base 15: mod_base = OTHER; note = uracil
  modified_base 22: mod_base = OTHER; note = uracil
  source 1..24: mol_type = other DNA
actgaggacgaggctgactactac

SEQ ID NO: 442 - DNA, 24 bp, synthetic construct
  misc_feature 1..24: note = synthetic sequence
  modified_base 15: mod_base = OTHER; note = uracil
  modified_base 22: mod_base = OTHER; note = uracil
  source 1..24: mol_type = other DNA
accaaaggcggggctgactattac

SEQ ID NO: 443 - DNA, 24 bp, synthetic construct
  misc_feature 1..24: note = synthetic sequence
  modified_base 9: mod_base = OTHER; note = uracil
  modified_base 22: mod_base = OTHER; note = uracil
  source 1..24: mol_type = other DNA
gcagatgatgaatctgattattac

SEQ ID NO: 444 - DNA, 22 bp, synthetic construct
  misc_feature 1..22: note = synthetic sequence
  modified_base 15: mod_base = OTHER; note = uracil
  source 1..22: mol_type = other DNA
gctggggacgaggctttcctct

SEQ ID NO: 445 - DNA, 24 bp, synthetic construct
  misc_feature 1..24: note = synthetic sequence
  modified_base 9: mod_base = OTHER; note = uracil
  modified_base 22: mod_base = OTHER; note = uracil
  source 1..24: mol_type = other DNA
gcagaagatgaggctgactattac

SEQ ID NO: 446 - DNA, 24 bp, synthetic construct
  misc_feature 1..24: note = synthetic sequence
  modified_base 9: mod_base = OTHER; note = uracil
  modified_base 19: mod_base = OTHER; note = uracil
  source 1..24: mol_type = other DNA
gaagaggatgagagtgactaccac

SEQ ID NO: 447 - DNA, 24 bp, synthetic construct
  misc_feature 1..24: note = synthetic sequence
  modified_base 9: mod_base = OTHER; note = uracil
  modified_base 22: mod_base = OTHER; note = uracil
  source 1..24: mol_type = other DNA
gcggaagatgaggctgactattac

SEQ ID NO: 448 - DNA, 24 bp, synthetic construct
  misc_feature 1..24: note = synthetic sequence
  modified_base 3: mod_base = OTHER; note = uracil
  modified_base 22: mod_base = OTHER; note = uracil
  source 1..24: mol_type = other DNA
cctgaggacgaggccgattattac

SEQ ID NO: 449 - DNA, 24 bp, synthetic construct
  misc_feature 1..24: note = synthetic sequence
  modified_base 15: mod_base = OTHER; note = uracil
  modified_base 22: mod_base = OTHER; note = uracil
  source 1..24: mol_type = other DNA
gcagaagacgaggctgactattac

SEQ ID NO: 450 - DNA, 24 bp, synthetic construct
  misc_feature 1..24: note = synthetic sequence
  modified_base 7: mod_base = OTHER; note = uracil
  modified_base 22: mod_base = OTHER; note = uracil
  source 1..24: mol_type = other DNA
acaggatggaaacaaggctattac

SEQ ID NO: 451 - DNA, 24 bp, synthetic construct
  misc_feature 1..24: note = synthetic sequence
  modified_base 7: mod_base = OTHER; note = uracil
  modified_base 22: mod_base = OTHER; note = uracil
  source 1..24: mol_type = other DNA
ccaggctggaaacaaggctattac

SEQ ID NO: 452 - DNA, 24 bp, synthetic construct
  misc_feature 1..24: note = synthetic sequence
  modified_base 19: mod_base = OTHER; note = uracil
  modified_base 22: mod_base = OTHER; note = uracil
  source 1..24: mol_type = other DNA
ccaggccagggacgaggctattac

SEQ ID NO: 453 - DNA, 24 bp, synthetic construct
  misc_feature 1..24: note = synthetic sequence
  modified_base 7: mod_base = OTHER; note = uracil
  modified_base 22: mod_base = OTHER; note = uracil
  source 1..24: mol_type = other DNA
ccaggctggggaccaggctattac

SEQ ID NO: 454 - DNA, 24 bp, synthetic construct
  misc_feature 1..24: note = synthetic sequence
  modified_base 13: mod_base = OTHER; note = uracil
  modified_base 22: mod_base = OTHER; note = uracil
  source 1..24: mol_type = other DNA
cctgagatcaagtccgactattac

SEQ ID NO: 455 - DNA, 23 bp, synthetic construct
  misc_feature 1..23: note = synthetic sequence
  modified_base 7: mod_base = OTHER; note = uracil
  modified_base 21: mod_base = OTHER; note = uracil
  source 1..23: mol_type = other DNA
ccaggctgggacgaggctattac

SEQ ID NO: 456 - DNA, 24 bp, synthetic construct
  misc_feature 1..24: note = synthetic sequence
  modified_base 9: mod_base = OTHER; note = uracil
  modified_base 22: mod_base = OTHER; note = uracil
  source 1..24: mol_type = other DNA
ccgagaggtgaagctgagtactac

SEQ ID NO: 457 - DNA, 25 bp, synthetic construct
  misc_feature 1..25: note = synthetic sequence
  source 1..25: mol_type = other DNA
gctgaggatgaggctgattattact

SEQ ID NO: 458 - DNA, 25 bp, synthetic construct
  misc_feature 1..25: note = synthetic sequence
  source 1..25: mol_type = other DNA
cctgaggacgaggctgagtattact

SEQ ID NO: 459 - DNA, 25 bp, synthetic construct
  misc_feature 1..25: note = synthetic sequence
  source 1..25: mol_type = other DNA
tctgaggatgaggctgactattact

SEQ ID NO: 460 - DNA, 25 bp, synthetic construct
  misc_feature 1..25: note = synthetic sequence
  source 1..25: mol_type = other DNA
tccgaggatgaggctgattattact

SEQ ID NO: 461 - DNA, 25 bp, synthetic construct
  misc_feature 1..25: note = synthetic sequence
  source 1..25: mol_type = other DNA
cctgaggacgaggctgactattact

SEQ ID NO: 462 - DNA, 25 bp, synthetic construct
  misc_feature 1..25: note = synthetic sequence
  source 1..25: mol_type = other DNA
actgaggacgaggctgactattact

SEQ ID NO: 463 - DNA, 25 bp, synthetic construct
  misc_feature 1..25: note = synthetic sequence
  source 1..25: mol_type = other DNA
tctgaagatgaggctgactattact

SEQ ID NO: 464 - DNA, 25 bp, synthetic construct
  misc_feature 1..25: note = synthetic sequence
  source 1..25: mol_type = other DNA
ttagaggatgaggctgattattact

SEQ ID NO: 465 - DNA, 25 bp, synthetic construct
  misc_feature 1..25: note = synthetic sequence
  source 1..25: mol_type = other DNA
gctgaggacgaggctgattattagt

SEQ ID NO: 466 - DNA, 25 bp, synthetic construct
  misc_feature 1..25: note = synthetic sequence
  source 1..25: mol_type = other DNA
tctgaggatgaggctgattattact

SEQ ID NO: 467 - DNA, 25 bp, synthetic construct
  misc_feature 1..25: note = synthetic sequence
  source 1..25: mol_type = other DNA
cctgaggatgaggctgactattact

SEQ ID NO: 468 - DNA, 25 bp, synthetic construct
  misc_feature 1..25: note = synthetic sequence
  source 1..25: mol_type = other DNA
gctgaggacgaggctgattattact

SEQ ID NO: 469 - DNA, 25 bp, synthetic construct
  misc_feature 1..25: note = synthetic sequence
  source 1..25: mol_type = other DNA
cctgaggatgaggctgagtattact

SEQ ID NO: 470 - DNA, 25 bp, synthetic construct
  misc_feature 1..25: note = synthetic sequence
  source 1..25: mol_type = other DNA
cctgaggacgaggctgattattact

SEQ ID NO: 471 - DNA, 25 bp, synthetic construct
  misc_feature 1..25: note = synthetic sequence
  source 1..25: mol_type = other DNA
tttgaggatgaggctgattattact

SEQ ID NO: 472 - DNA, 26 bp, synthetic construct
  misc_feature 1..26: note = synthetic sequence
  source 1..26: mol_type = other DNA
gcctgaggacgaggctatgtattact

SEQ ID NO: 473 - DNA, 26 bp, synthetic construct
  misc_feature 1..26: note = synthetic sequence
  source 1..26: mol_type = other DNA
ggcagaagacgaggctgactattact

SEQ ID NO: 474 - DNA, 26 bp, synthetic construct
  misc_feature 1..26: note = synthetic sequence
  source 1..26: mol_type = other DNA
gtctgacgatgaggctgagtatcact

SEQ ID NO: 475 - DNA, 26 bp, synthetic construct
  misc_feature 1..26: note = synthetic sequence
  source 1..26: mol_type = other DNA
ggcagatgatgaatctgattattact

SEQ ID NO: 476 - DNA, 26 bp, synthetic construct
  misc_feature 1..26: note = synthetic sequence
  source 1..26: mol_type = other DNA
gtccgaggttgaggctaattatcact

SEQ ID NO: 477 - DNA, 26 bp, synthetic construct
  misc_feature 1..26: note = synthetic sequence
  source 1..26: mol_type = other DNA
ggttgaacatgaagctgactattacc

SEQ ID NO: 478 - DNA, 26 bp, synthetic construct
  misc_feature 1..26: note = synthetic sequence
  source 1..26: mol_type = other DNA
ggctatggatgaggctgactattact

SEQ ID NO: 479 - DNA, 26 bp, synthetic construct
  misc_feature 1..26: note = synthetic sequence
  source 1..26: mol_type = other DNA
ggcggaagatgaggctgactattact

SEQ ID NO: 480 - DNA, 26 bp, synthetic construct
  misc_feature 1..26: note = synthetic sequence
  source 1..26: mol_type = other DNA
ggaagaggatgagagtgactaccact

SEQ ID NO: 481 - DNA, 26 bp, synthetic construct
  misc_feature 1..26: note = synthetic sequence
  source 1..26: mol_type = other DNA
ggttgaggatgaggctgactattact

SEQ ID NO: 482 - DNA, 26 bp, synthetic construct
  misc_feature 1..26: note = synthetic sequence
  source 1..26: mol_type = other DNA
gaccaaaggcggggctgactattact

SEQ ID NO: 483 - DNA, 26 bp, synthetic construct
  misc_feature 1..26: note = synthetic sequence
  source 1..26: mol_type = other DNA
gaccaaggacaagcctgcctattact

SEQ ID NO: 484 - DNA, 26 bp, synthetic construct
  misc_feature 1..26: note = synthetic sequence
  source 1..26: mol_type = other DNA
ggctggggatgaggctgactattact

SEQ ID NO: 485 - DNA, 26 bp, synthetic construct
  misc_feature 1..26: note = synthetic sequence
  source 1..26: mol_type = other DNA
gactggggacgaggccgattattact

SEQ ID NO: 486 - DNA, 26 bp, synthetic construct
  misc_feature 1..26: note = synthetic sequence
  source 1..26: mol_type = other DNA
ggttgaagacaaggctgactattact

SEQ ID NO: 487 - DNA, 26 bp, synthetic construct
  misc_feature 1..26: note = synthetic sequence
  source 1..26: mol_type = other DNA
gaccgaagacgaggctgactattact

SEQ ID NO: 488 - DNA, 26 bp, synthetic construct
  misc_feature 1..26: note = synthetic sequence
  source 1..26: mol_type = other DNA
ggtggaggatgaagatgactactact

SEQ ID NO: 489 - DNA, 26 bp, synthetic construct
  misc_feature 1..26: note = synthetic sequence
  source 1..26: mol_type = other DNA
gactgaggacgaggctgactactact

SEQ ID NO: 490 - DNA, 26 bp, synthetic construct
  misc_feature 1..26: note = synthetic sequence
  source 1..26: mol_type = other DNA
gtctgaggatggagctgactatatct

SEQ ID NO: 491 - DNA, 26 bp, synthetic construct
  misc_feature 1..26: note = synthetic sequence
  source 1..26: mol_type = other DNA
agccggggatgaggccgactattact

SEQ ID NO: 492 - DNA, 25 bp, synthetic construct
  misc_feature 1..25: note = synthetic sequence
  source 1..25: mol_type = other DNA
ggcagatgatgaactgattattact

SEQ ID NO: 493 - DNA, 26 bp, synthetic construct
  misc_feature 1..26: note = synthetic sequence
  source 1..26: mol_type = other DNA
ggtggaggatgaagctgactactact

SEQ ID NO: 494 - DNA, 26 bp, synthetic construct
  misc_feature 1..26: note = synthetic sequence
  source 1..26: mol_type = other DNA
ggaagaagatgagagtgactaccact

SEQ ID NO: 495 - DNA, 26 bp, synthetic construct
  misc_feature 1..26: note = synthetic sequence
  source 1..26: mol_type = other DNA
ggctgaggacaagactgattatcact

SEQ ID NO: 496 - DNA, 26 bp, synthetic construct
  misc_feature 1..26: note = synthetic sequence
  source 1..26: mol_type = other DNA
gcctgaggactaggccgattattact

SEQ ID NO: 497 - DNA, 26 bp, synthetic construct
  misc_feature 1..26: note = synthetic sequence
  source 1..26: mol_type = other DNA
ggcagaagatgaggctgactattact

SEQ ID NO: 498 - DNA, 26 bp, synthetic construct
  misc_feature 1..26: note = synthetic sequence
  source 1..26: mol_type = other DNA
gcctgaggacgaggccgattattact

SEQ ID NO: 499 - DNA, 26 bp, synthetic construct
  misc_feature 1..26: note = synthetic sequence
  source 1..26: mol_type = other DNA
agccggggatgaggctgactattact

SEQ ID NO: 500 - DNA, 23 bp, synthetic construct
  misc_feature 1..23: note = synthetic sequence
  source 1..23: mol_type = other DNA
ggctggggacgaggctttcctct

SEQ ID NO: 501 - DNA, 25 bp, synthetic construct
  misc_feature 1..25: note = synthetic sequence
  source 1..25: mol_type = other DNA
acaggatggaaacaaggctattact

SEQ ID NO: 502 - DNA, 24 bp, synthetic construct
  misc_feature 1..24: note = synthetic sequence
  source 1..24: mol_type = other DNA
ccaggctgggacgaggctattact

SEQ ID NO: 503 - DNA, 25 bp, synthetic construct
  misc_feature 1..25: note = synthetic sequence
  source 1..25: mol_type = other DNA
ccaggccagggacgaggctattact

SEQ ID NO: 504 - DNA, 25 bp, synthetic construct
  misc_feature 1..25: note = synthetic sequence
  source 1..25: mol_type = other DNA
ccaggctggggaccaggctattact

SEQ ID NO: 505 - DNA, 25 bp, synthetic construct
  misc_feature 1..25: note = synthetic sequence
  source 1..25: mol_type = other DNA
ccaggctggaaacaaggctattact

SEQ ID NO: 506 - DNA, 25 bp, synthetic construct
  misc_feature 1..25: note = synthetic sequence
  source 1..25: mol_type = other DNA
cctgagatcaagtccgactattact

SEQ ID NO: 507 - DNA, 25 bp, synthetic construct
  misc_feature 1..25: note = synthetic sequence
  source 1..25: mol_type = other DNA
ccgagaggtgaagctgagtactact

SEQ ID NO: 508 - DNA, 25 bp, synthetic construct
  misc_feature 1..25: note = synthetic sequence
  modified_base 9: mod_base = OTHER; note = uracil
  modified_base 22: mod_base = OTHER; note = uracil
  source 1..25: mol_type = other DNA
gctgaggatgaggctgattattact

SEQ ID NO: 509 - DNA, 25 bp, synthetic construct
  misc_feature 1..25: note = synthetic sequence
  modified_base 15: mod_base = OTHER; note = uracil
  modified_base 22: mod_base = OTHER; note = uracil
  source 1..25: mol_type = other DNA
cctgaggacgaggctgagtattact

SEQ ID NO: 510 - DNA, 25 bp, synthetic construct
  misc_feature 1..25: note = synthetic sequence
  modified_base 9: mod_base = OTHER; note = uracil
  modified_base 22: mod_base = OTHER; note = uracil
  source 1..25: mol_type = other DNA
tctgaggatgaggctgactattact

SEQ ID NO: 511 - DNA, 25 bp, synthetic construct
  misc_feature 1..25: note = synthetic sequence
  modified_base 9: mod_base = OTHER; note = uracil
  modified_base 22: mod_base = OTHER; note = uracil
  source 1..25: mol_type = other DNA
tccgaggatgaggctgattattact

SEQ ID NO: 512 - DNA, 25 bp, synthetic construct
  misc_feature 1..25: note = synthetic sequence
  modified_base 15: mod_base = OTHER; note = uracil
  modified_base 22: mod_base = OTHER; note = uracil
  source 1..25: mol_type = other DNA
cctgaggacgaggctgactattact

SEQ ID NO: 513 - DNA, 25 bp, synthetic construct
  misc_feature 1..25: note = synthetic sequence
  modified_base 15: mod_base = OTHER; note = uracil
  modified_base 22: mod_base = OTHER; note = uracil
  source 1..25: mol_type = other DNA
actgaggacgaggctgactattact

SEQ ID NO: 514 - DNA, 25 bp, synthetic construct
  misc_feature 1..25: note = synthetic sequence
  modified_base 9: mod_base = OTHER; note = uracil
  modified_base 22: mod_base = OTHER; note = uracil
  source 1..25: mol_type = other DNA
tctgaagatgaggctgactattact

SEQ ID NO: 515 - DNA, 25 bp, synthetic construct
  misc_feature 1..25: note = synthetic sequence
  modified_base 9: mod_base = OTHER; note = uracil
  modified_base 22: mod_base = OTHER; note = uracil
  source 1..25: mol_type = other DNA
ttagaggatgaggctgattattact

SEQ ID NO: 516 - DNA, 25 bp, synthetic construct
  misc_feature 1..25: note = synthetic sequence
  modified_base 15: mod_base = OTHER; note = uracil
  modified_base 22: mod_base = OTHER; note = uracil
  source 1..25: mol_type = other DNA
gctgaggacgaggctgattattagt

SEQ ID NO: 517 - DNA, 25 bp, synthetic construct
  misc_feature 1..25: note = synthetic sequence
  modified_base 9: mod_base = OTHER; note = uracil
  modified_base 22: mod_base = OTHER; note = uracil
  source 1..25: mol_type = other DNA
tctgaggatgaggctgattattact

SEQ ID NO: 518 - DNA, 25 bp, synthetic construct
  misc_feature 1..25: note = synthetic sequence
  modified_base 9: mod_base = OTHER; note = uracil
  modified_base 22: mod_base = OTHER; note = uracil
  source 1..25: mol_type = other DNA
cctgaggatgaggctgactattact

SEQ ID NO: 519 - DNA, 25 bp, synthetic construct
  misc_feature 1..25: note = synthetic sequence
  modified_base 15: mod_base = OTHER; note = uracil
  modified_base 22: mod_base = OTHER; note = uracil
  source 1..25: mol_type = other DNA
gctgaggacgaggctgattattact

SEQ ID NO: 520 - DNA, 25 bp, synthetic construct
  misc_feature 1..25: note = synthetic sequence
  modified_base 9: mod_base = OTHER; note = uracil
  modified_base 22: mod_base = OTHER; note = uracil
  source 1..25: mol_type = other DNA
cctgaggatgaggctgagtattact

SEQ ID NO: 521 - DNA, 25 bp, synthetic construct
  misc_feature 1..25: note = synthetic sequence
  modified_base 15: mod_base = OTHER; note = uracil
  modified_base 22: mod_base = OTHER; note = uracil
  source 1..25: mol_type = other DNA
cctgaggacgaggctgattattact

SEQ ID NO: 522 - DNA, 25 bp, synthetic construct
  misc_feature 1..25: note = synthetic sequence
  modified_base 9: mod_base = OTHER; note = uracil
  modified_base 22: mod_base = OTHER; note = uracil
  source 1..25: mol_type = other DNA
tttgaggatgaggctgattattact

SEQ ID NO: 523 - DNA, 26 bp, synthetic construct
  misc_feature 1..26: note = synthetic sequence
  modified_base 16: mod_base = OTHER; note = uracil
  modified_base 23: mod_base = OTHER; note = uracil
  source 1..26: mol_type = other DNA
gcctgaggacgaggctatgtattact

SEQ ID NO: 524 - DNA, 26 bp, synthetic construct
  misc_feature 1..26: note = synthetic sequence
  modified_base 16: mod_base = OTHER; note = uracil
  modified_base 23: mod_base = OTHER; note = uracil
  source 1..26: mol_type = other DNA
ggcagaagacgaggctgactattact

SEQ ID NO: 525 - DNA, 26 bp, synthetic construct
  misc_feature 1..26: note = synthetic sequence
  modified_base 10: mod_base = OTHER; note = uracil
  modified_base 22: mod_base = OTHER; note = uracil
  source 1..26: mol_type = other DNA
gtctgacgatgaggctgagtatcact

SEQ ID NO: 526 - DNA, 26 bp, synthetic construct
  misc_feature 1..26: note = synthetic sequence
  modified_base 10: mod_base = OTHER; note = uracil
  modified_base 23: mod_base = OTHER; note = uracil
  source 1..26: mol_type = other DNA
ggcagatgatgaatctgattattact

SEQ ID NO: 527 - DNA, 26 bp, synthetic construct
  misc_feature 1..26: note = synthetic sequence
  modified_base 10: mod_base = OTHER; note = uracil
  modified_base 22: mod_base = OTHER; note = uracil
  source 1..26: mol_type = other DNA
gtccgaggttgaggctaattatcact

SEQ ID NO: 528 - DNA, 26 bp, synthetic construct
  misc_feature 1..26: note = synthetic sequence
  modified_base 10: mod_base = OTHER; note = uracil
  modified_base 23: mod_base = OTHER; note = uracil
  source 1..26: mol_type = other DNA
ggttgaacatgaagctgactattacc

SEQ ID NO: 529 - DNA, 26 bp, synthetic construct
  misc_feature 1..26: note = synthetic sequence
  modified_base 10: mod_base = OTHER; note = uracil
  modified_base 23: mod_base = OTHER; note = uracil
  source 1..26: mol_type = other DNA
ggctatggatgaggctgactattact

SEQ ID NO: 530 - DNA, 26 bp, synthetic construct
  misc_feature 1..26: note = synthetic sequence
  modified_base 10: mod_base = OTHER; note = uracil
  modified_base 23: mod_base = OTHER; note = uracil
  source 1..26: mol_type = other DNA
ggcggaagatgaggctgactattact

SEQ ID NO: 531 - DNA, 26 bp, synthetic construct
  misc_feature 1..26: note = synthetic sequence
  modified_base 10: mod_base = OTHER; note = uracil
  modified_base 20: mod_base = OTHER; note = uracil
  source 1..26: mol_type = other DNA
ggaagaggatgagagtgactaccact

SEQ ID NO: 532 - DNA, 26 bp, synthetic construct
  misc_feature 1..26: note = synthetic sequence
  modified_base 10: mod_base = OTHER; note = uracil
  modified_base 23: mod_base = OTHER; note = uracil
  source 1..26: mol_type = other DNA
ggttgaggatgaggctgactattact

SEQ ID NO: 533 - DNA, 26 bp, synthetic construct
  misc_feature 1..26: note = synthetic sequence
  modified_base 16: mod_base = OTHER; note = uracil
  modified_base 23: mod_base = OTHER; note = uracil
  source 1..26: mol_type = other DNA
gaccaaaggcggggctgactattact

SEQ ID NO: 534 - DNA, 26 bp, synthetic construct
  misc_feature 1..26: note = synthetic sequence
  modified_base 16: mod_base = OTHER; note = uracil
  modified_base 23: mod_base = OTHER; note = uracil
  source 1..26: mol_type = other DNA
gaccaaggacaagcctgcctattact

SEQ ID NO: 535 - DNA, 26 bp, synthetic construct
  misc_feature 1..26: note = synthetic sequence
  modified_base 10: mod_base = OTHER; note = uracil
  modified_base 23: mod_base = OTHER; note = uracil
  source 1..26: mol_type = other DNA
ggctggggatgaggctgactattact

SEQ ID NO: 536 - DNA, 26 bp, synthetic construct
  misc_feature 1..26: note = synthetic sequence
  modified_base 4: mod_base = OTHER; note = uracil
  modified_base 23: mod_base = OTHER; note = uracil
  source 1..26: mol_type = other DNA
gactggggacgaggccgattattact

SEQ ID NO: 537 - DNA, 26 bp, synthetic construct
  misc_feature 1..26: note = synthetic sequence
  modified_base 16: mod_base = OTHER; note = uracil
  modified_base 23: mod_base = OTHER; note = uracil
  source 1..26: mol_type = other DNA
ggttgaagacaaggctgactattact

SEQ ID NO: 538 - DNA, 26 bp, synthetic construct
  misc_feature 1..26: note = synthetic sequence
  modified_base 16: mod_base = OTHER; note = uracil
  modified_base 23: mod_base = OTHER; note = uracil
  source 1..26: mol_type = other DNA
gaccgaagacgaggctgactattact

SEQ ID NO: 539 - DNA, 26 bp, synthetic construct
  misc_feature 1..26: note = synthetic sequence
  modified_base 10: mod_base = OTHER; note = uracil
  modified_base 23: mod_base = OTHER; note = uracil
  source 1..26: mol_type = other DNA
ggtggaggatgaagatgactactact

SEQ ID NO: 540 - DNA, 26 bp, synthetic construct
  misc_feature 1..26: note = synthetic sequence
  modified_base 16: mod_base = OTHER; note = uracil
  modified_base 23: mod_base = OTHER; note = uracil
  source 1..26: mol_type = other DNA
gactgaggacgaggctgactactact

SEQ ID NO: 541 - DNA, 26 bp, synthetic construct
  misc_feature 1..26: note = synthetic sequence
  modified_base 10: mod_base = OTHER; note = uracil
  modified_base 24: mod_base = OTHER; note = uracil
  source 1..26: mol_type = other DNA
gtctgaggatggagctgactatatct

SEQ ID NO: 542 - DNA, 26 bp, synthetic construct
  misc_feature 1..26: note = synthetic sequence
  modified_base 10: mod_base = OTHER; note = uracil
  modified_base 23: mod_base = OTHER; note = uracil
  source 1..26: mol_type = other DNA
agccggggatgaggccgactattact

SEQ ID NO: 543 - DNA, 25 bp, synthetic construct
  misc_feature 1..25: note = synthetic sequence
  modified_base 10: mod_base = OTHER; note = uracil
  modified_base 22: mod_base = OTHER; note = uracil
  source 1..25: mol_type = other DNA
ggcagatgatgaactgattattact

SEQ ID NO: 544 - DNA, 26 bp, synthetic construct
  misc_feature 1..26: note = synthetic sequence
  modified_base 10: mod_base = OTHER; note = uracil
  modified_base 23: mod_base = OTHER; note = uracil
  source 1..26: mol_type = other DNA
ggtggaggatgaagctgactactact

SEQ ID NO: 545 - DNA, 26 bp, synthetic construct
  misc_feature 1..26: note = synthetic sequence
  modified_base 10: mod_base = OTHER; note = uracil
  modified_base 20: mod_base = OTHER; note = uracil
  source 1..26: mol_type = other DNA
ggaagaagatgagagtgactaccact

SEQ ID NO: 546 - DNA, 26 bp, synthetic construct
  misc_feature 1..26: note = synthetic sequence
  modified_base 4: mod_base = OTHER; note = uracil
  modified_base 22: mod_base = OTHER; note = uracil
  source 1..26: mol_type = other DNA
ggctgaggacaagactgattatcact

SEQ ID NO: 547 - DNA, 26 bp, synthetic construct
  misc_feature 1..26: note = synthetic sequence
  modified_base 11: mod_base = OTHER; note = uracil
  modified_base 23: mod_base = OTHER; note = uracil
  source 1..26: mol_type = other DNA
gcctgaggactaggccgattattact

SEQ ID NO: 548 - DNA, 26 bp, synthetic construct
  misc_feature 1..26: note = synthetic sequence
  modified_base 10: mod_base = OTHER; note = uracil
  modified_base 23: mod_base = OTHER; note = uracil
  source 1..26: mol_type = other DNA
ggcagaagatgaggctgactattact

SEQ ID NO: 549 - DNA, 18 bp, synthetic construct
  misc_feature 1..18: note = synthetic sequence
  source 1..18: mol_type = other DNA
gacggtcagctccgtccc

SEQ ID NO: 550 - DNA, 18 bp, synthetic construct
  misc_feature 1..18: note = synthetic sequence
  source 1..18: mol_type = other DNA
gacggtcagctcggtccc

SEQ ID NO: 551 - DNA, 18 bp, synthetic construct
  misc_feature 1..18: note = synthetic sequence
  source 1..18: mol_type = other DNA
gacggtgaccttggtccc

SEQ ID NO: 552 - DNA, 18 bp, synthetic construct
  misc_feature 1..18: note = synthetic sequence
  source 1..18: mol_type = other DNA
gacggtcagctgggtgcc

SEQ ID NO: 553 - DNA, 18 bp, synthetic construct
  misc_feature 1..18: note = synthetic sequence
  source 1..18: mol_type = other DNA
aatgatcagctgggttcc

SEQ ID NO: 554 - DNA, 18 bp, synthetic construct
  misc_feature 1..18: note = synthetic sequence
  source 1..18: mol_type = other DNA
gacggtcaccttggtgcc

SEQ ID NO: 555 - DNA, 18 bp, synthetic construct
  misc_feature 1..18: note = synthetic sequence
  source 1..18: mol_type = other DNA
gacggtcagcttggtccc

SEQ ID NO: 556 - DNA, 18 bp, synthetic construct
  misc_feature 1..18: note = synthetic sequence
  source 1..18: mol_type = other DNA
ggcggtcagctgggtgcc

SEQ ID NO: 557 - DNA, 18 bp, synthetic construct
  misc_feature 1..18: note = synthetic sequence
  modified_base 6: mod_base = OTHER; note = uracil
  modified_base 15: mod_base = OTHER; note = uracil
  source 1..18: mol_type = other DNA
gacggtcagctccgtccc

SEQ ID NO: 558 - DNA, 18 bp, synthetic construct
  misc_feature 1..18: note = synthetic sequence
  modified_base 6: mod_base = OTHER; note = uracil
  modified_base 15: mod_base = OTHER; note = uracil
  source 1..18: mol_type = other DNA
gacggtcagctcggtccc

SEQ ID NO: 559 - DNA, 18 bp, synthetic construct
  misc_feature 1..18: note = synthetic sequence
  modified_base 6: mod_base = OTHER; note = uracil
  modified_base 15: mod_base = OTHER; note = uracil
  source 1..18: mol_type = other DNA
gacggtgaccttggtccc

SEQ ID NO: 560 - DNA, 18 bp, synthetic construct
  misc_feature 1..18: note = synthetic sequence
  modified_base 6: mod_base = OTHER; note = uracil
  modified_base 15: mod_base = OTHER; note = uracil
  source 1..18: mol_type = other DNA
gacggtcagctgggtgcc

SEQ ID NO: 561 - DNA, 18 bp, synthetic construct
  misc_feature 1..18: note = synthetic sequence
  modified_base 11: mod_base = OTHER; note = uracil
  modified_base 16: mod_base = OTHER; note = uracil
  source 1..18: mol_type = other DNA
aatgatcagctgggttcc

SEQ ID NO: 562 - DNA, 18 bp, synthetic construct
  misc_feature 1..18: note = synthetic sequence
  modified_base 6: mod_base = OTHER; note = uracil
  modified_base 15: mod_base = OTHER; note = uracil
  source 1..18: mol_type = other DNA
gacggtcaccttggtgcc

SEQ ID NO: 563 - DNA, 18 bp, synthetic construct
  misc_feature 1..18: note = synthetic sequence
  modified_base 6: mod_base = OTHER; note = uracil
  modified_base 15: mod_base = OTHER; note = uracil
  source 1..18: mol_type = other DNA
gacggtcagcttggtccc

SEQ ID NO: 564 - DNA, 18 bp, synthetic construct
  misc_feature 1..18: note = synthetic sequence
  modified_base 6: mod_base = OTHER; note = uracil
  modified_base 15: mod_base = OTHER; note = uracil
  source 1..18: mol_type = other DNA
ggcggtcagctgggtgcc

SEQ ID NO: 565 - DNA, 18 bp, synthetic construct
  misc_feature 1..18: note = synthetic sequence
  source 1..18: mol_type = other DNA
ggacggtcagctgggtgc

SEQ ID NO: 566 - DNA, 18 bp, synthetic construct
  misc_feature 1..18: note = synthetic sequence
  source 1..18: mol_type = other DNA
gggcggtcagctgggtgc

SEQ ID NO: 567 - DNA, 18 bp, synthetic construct
  misc_feature 1..18: note = synthetic sequence
  source 1..18: mol_type = other DNA
aaatgatcagctgggttc

SEQ ID NO: 568 - DNA, 18 bp, synthetic construct
  misc_feature 1..18: note = synthetic sequence
  source 1..18: mol_type = other DNA
ggacggtgaccttggtcc

SEQ ID NO: 569 - DNA, 18 bp, synthetic construct
  misc_feature 1..18: note = synthetic sequence
  source 1..18: mol_type = other DNA
ggacggtcaccttggtgc

SEQ ID NO: 570 - DNA, 18 bp, synthetic construct
  misc_feature 1..18: note = synthetic sequence
  source 1..18: mol_type = other DNA
ggacggtcagcttggtcc

SEQ ID NO: 571 - DNA, 18 bp, synthetic construct
  misc_feature 1..18: note = synthetic sequence
  source 1..18: mol_type = other DNA
ggacggtcagctccgtcc

SEQ ID NO: 572 - DNA, 18 bp, synthetic construct
  misc_feature 1..18: note = synthetic sequence
  source 1..18: mol_type = other DNA
ggacggtcagctcggtcc

SEQ ID NO: 573 - DNA, 18 bp, synthetic construct
  misc_feature 1..18: note = synthetic sequence
  modified_base 7: mod_base = OTHER; note = uracil
  modified_base 16: mod_base = OTHER; note = uracil
  source 1..18: mol_type = other DNA
ggacggtcagctgggtgc

SEQ ID NO: 574 - DNA, 18 bp, synthetic construct
  misc_feature 1..18: note = synthetic sequence
  modified_base 7: mod_base = OTHER; note = uracil
  modified_base 16: mod_base = OTHER; note = uracil
  source 1..18: mol_type = other DNA
gggcggtcagctgggtgc

SEQ ID NO: 575 - DNA, 18 bp, synthetic construct
  misc_feature 1..18: note = synthetic sequence
  modified_base 7: mod_base = OTHER; note = uracil
  modified_base 17: mod_base = OTHER; note = uracil
  source 1..18: mol_type = other DNA
aaatgatcagctgggttc

SEQ ID NO: 576 - DNA, 18 bp, synthetic construct
  misc_feature 1..18: note = synthetic sequence
  modified_base 7: mod_base = OTHER; note = uracil
  modified_base 16: mod_base = OTHER; note = uracil
  source 1..18: mol_type = other DNA
ggacggtgaccttggtcc

SEQ ID NO: 577 - DNA, 18 bp, synthetic construct
  misc_feature 1..18: note = synthetic sequence
  modified_base 7: mod_base = OTHER; note = uracil
  modified_base 16: mod_base = OTHER; note = uracil
  source 1..18: mol_type = other DNA
ggacggtcaccttggtgc

SEQ ID NO: 578 - DNA, 18 bp, synthetic construct
  misc_feature 1..18: note = synthetic sequence
  modified_base 7: mod_base = OTHER; note = uracil
  modified_base 16: mod_base = OTHER; note = uracil
  source 1..18: mol_type = other DNA
ggacggtcagcttggtcc

SEQ ID NO: 579 - DNA, 18 bp, synthetic construct
  misc_feature 1..18: note = synthetic sequence
  modified_base 7: mod_base = OTHER; note = uracil
  modified_base 16: mod_base = OTHER; note = uracil
  source 1..18: mol_type = other DNA
ggacggtcagctccgtcc

SEQ ID NO: 580 - DNA, 18 bp, synthetic construct
  misc_feature 1..18: note = synthetic sequence
  modified_base 7: mod_base = OTHER; note = uracil
  modified_base 16: mod_base = OTHER; note = uracil
  source 1..18: mol_type = other DNA
ggacggtcagctcggtcc

SEQ ID NO: 581 - DNA, 19 bp, synthetic construct
  misc_feature 1..19: note = synthetic sequence
  source 1..19: mol_type = other DNA
cgaggacggtcagctgggt

SEQ ID NO: 582 - DNA, 19 bp, synthetic construct
  misc_feature 1..19: note = synthetic sequence
  source 1..19: mol_type = other DNA
cgagggcggtcagctgggt

SEQ ID NO: 583 - DNA, 19 bp, synthetic construct
  misc_feature 1..19: note = synthetic sequence
  source 1..19: mol_type = other DNA
ctaggacggtgaccttggt

SEQ ID NO: 584 - DNA, 19 bp, synthetic construct
  misc_feature 1..19: note = synthetic sequence
  source 1..19: mol_type = other DNA
cgaggacggtcaccttggt

SEQ ID NO: 585 - DNA, 19 bp, synthetic construct
  misc_feature 1..19: note = synthetic sequence
  source 1..19: mol_type = other DNA
ctaggacggtcagctccgt

SEQ ID NO: 586 - DNA, 19 bp, synthetic construct
  misc_feature 1..19: note = synthetic sequence
  source 1..19: mol_type = other DNA
ctaggacggtcagcttggt

SEQ ID NO: 587 - DNA, 19 bp, synthetic construct
  misc_feature 1..19: note = synthetic sequence
  source 1..19: mol_type = other DNA
ctaaaatgatcagctgggt

SEQ ID NO: 588 - DNA, 19 bp, synthetic construct
  misc_feature 1..19: note = synthetic sequence
  source 1..19: mol_type = other DNA
ctaggacggtcagctcggt

SEQ ID NO: 589 - DNA, 19 bp, synthetic construct
  misc_feature 1..19: note = synthetic sequence
  modified_base 10: mod_base = OTHER; note = uracil
  modified_base 15: mod_base = OTHER; note = uracil
  source 1..19: mol_type = other DNA
cgaggacggtcagctgggt

SEQ ID NO: 590 - DNA, 19 bp, synthetic construct
  misc_feature 1..19: note = synthetic sequence
  modified_base 10: mod_base = OTHER; note = uracil
  modified_base 15: mod_base = OTHER; note = uracil
  source 1..19: mol_type = other DNA
cgagggcggtcagctgggt

SEQ ID NO: 591 - DNA, 19 bp, synthetic construct
  misc_feature 1..19: note = synthetic sequence
  modified_base 10: mod_base = OTHER; note = uracil
  modified_base 16: mod_base = OTHER; note = uracil
  source 1..19: mol_type = other DNA
ctaggacggtgaccttggt

SEQ ID NO: 592 - DNA, 19 bp, synthetic construct
  misc_feature 1..19: note = synthetic sequence
  modified_base 10: mod_base = OTHER; note = uracil
  modified_base 16: mod_base = OTHER; note = uracil
  source 1..19: mol_type = other DNA
cgaggacggtcaccttggt

SEQ ID NO: 593 - DNA, 19 bp, synthetic construct
  misc_feature 1..19: note = synthetic sequence
  modified_base 10: mod_base = OTHER; note = uracil
  modified_base 15: mod_base = OTHER; note = uracil
  source 1..19: mol_type = other DNA
ctaggacggtcagctccgt

SEQ ID NO: 594 - DNA, 19 bp, synthetic construct
  misc_feature 1..19: note = synthetic sequence
  modified_base 10: mod_base = OTHER; note = uracil
  modified_base 16: mod_base = OTHER; note = uracil
  source 1..19: mol_type = other DNA
ctaggacggtcagcttggt

SEQ ID NO: 595 - DNA, 19 bp, synthetic construct
  misc_feature 1..19: note = synthetic sequence
  modified_base 7: mod_base = OTHER; note = uracil
  modified_base 15: mod_base = OTHER; note = uracil
  source 1..19: mol_type = other DNA
ctaaaatgatcagctgggt

SEQ ID NO: 596 - DNA, 19 bp, synthetic construct
  misc_feature 1..19: note = synthetic sequence
  modified_base 10: mod_base = OTHER; note = uracil
  modified_base 15: mod_base = OTHER; note = uracil
  source 1..19: mol_type = other DNA
ctaggacggtcagctcggt

SEQ ID NO: 597 - DNA, 30 bp, synthetic construct
  misc_feature 1..30: note = synthetic sequence
  source 1..30: mol_type = other DNA
ctagagcctgaagattttgcagtgtattac

SEQ ID NO: 598 - DNA, 30 bp, synthetic construct
  misc_feature 1..30: note = synthetic sequence
  source 1..30: mol_type = other DNA
ctgcagcctgaagattttgcaacttattac

SEQ ID NO: 599 - DNA, 30 bp, synthetic construct
  misc_feature 1..30: note = synthetic sequence
  source 1..30: mol_type = other DNA
ctgcaacctgaagatgttataacttattgc

SEQ ID NO: 600 - DNA, 30 bp, synthetic construct
  misc_feature 1..30: note = synthetic sequence
  source 1..30: mol_type = other DNA
ctgcagcctgaagattttgcaacttactat

SEQ ID NO: 601 - DNA, 30 bp, synthetic construct
  misc_feature 1..30: note = synthetic sequence
  source 1..30: mol_type = other DNA
ctgcagcctgaagattttgcagtttattac

SEQ ID NO: 602 - DNA, 30 bp, synthetic construct
  misc_feature 1..30: note = synthetic sequence
  source 1..30: mol_type = other DNA
ctgcagtctgaagattttgcaacttattac

SEQ ID NO: 603 - DNA, 29 bp, synthetic construct
  misc_feature 1..29: note = synthetic sequence
  source 1..29: mol_type = other DNA
ctggagcctgaagatttgcacttcatcac

SEQ ID NO: 604 - DNA, 30 bp, synthetic construct
  misc_feature 1..30: note = synthetic sequence
  source 1..30: mol_type = other DNA
ctgcaacctgaagattttgcaacttattac

SEQ ID NO: 605 - DNA, 30 bp, synthetic construct
  misc_feature 1..30: note = synthetic sequence
  source 1..30: mol_type = other DNA
ctggagcctgaagattttgcagtttattac

SEQ ID NO: 606 - DNA, 30 bp, synthetic construct
  misc_feature 1..30: note = synthetic sequence
  source 1..30: mol_type = other DNA
ctggagcctgaagattttgcagtgtattac

SEQ ID NO: 607 - DNA, 30 bp, synthetic construct
  misc_feature 1..30: note = synthetic sequence
  source 1..30: mol_type = other DNA
ctagagcctgaagattttgcagtttattac

SEQ ID NO: 608 - DNA, 30 bp, synthetic construct
  misc_feature 1..30: note = synthetic sequence
  source 1..30: mol_type = other DNA
ctggagcctgaagattttgcagtctattac

SEQ ID NO: 609 - DNA, 30 bp, synthetic construct
  misc_feature 1..30: note = synthetic sequence
  source 1..30: mol_type = other DNA
ctggaagctgaagatgctgcaacatattac

SEQ ID NO: 610 - DNA, 30 bp, synthetic construct
  misc_feature 1..30: note = synthetic sequence
  source 1..30: mol_type = other DNA
ctgcaggctgaagatgtggcagtttattac

SEQ ID NO: 611 - DNA, 30 bp, synthetic construct
  misc_feature 1..30: note = synthetic sequence
  source 1..30: mol_type = other DNA
ctgcagcctgatgattttgcaacttattac

SEQ ID NO: 612 - DNA, 30 bp, synthetic construct
  misc_feature 1..30: note = synthetic sequence
  source 1..30: mol_type = other DNA
ctgaagcctgaagattttgcagcttattac

SEQ ID NO: 613 - DNA, 30 bp, synthetic construct
  misc_feature 1..30: note = synthetic sequence
  source 1..30: mol_type = other DNA
ctccagtctgaagttgctgcaacttcttat

SEQ ID NO: 614 - DNA, 30 bp, synthetic construct
  misc_feature 1..30: note = synthetic sequence
  source 1..30: mol_type = other DNA
ctgcagcctaaagatgttgcaacttattac

SEQ ID NO: 615 - DNA, 30 bp, synthetic construct
  misc_feature 1..30: note = synthetic sequence
  source 1..30: mol_type = other DNA
ctggaagctgaagatgctgcaacgtattac

SEQ ID NO: 616 - DNA, 30 bp, synthetic construct
  misc_feature 1..30: note = synthetic sequence
  source 1..30: mol_type = other DNA
ctgcagtctgaagattttgcagtttattac

SEQ ID NO: 617 - DNA, 31 bp, synthetic construct
  misc_feature 1..31: note = synthetic sequence
  source 1..31: mol_type = other DNA
ctagaccctgaagatgtcacaattttattac

SEQ ID NO: 618 - DNA, 30 bp, synthetic construct
  misc_feature 1..30: note = synthetic sequence
  source 1..30: mol_type = other DNA
ctgcagcctgaagatgttgcaacttattac

SEQ ID NO: 619 - DNA, 30 bp, synthetic construct
  misc_feature 1..30: note = synthetic sequence
  source 1..30: mol_type = other DNA
ctgcagcctgaagatattgcaacatattac

SEQ ID NO: 620 - DNA, 30 bp, synthetic construct
  misc_feature 1..30: note = synthetic sequence
  source 1..30: mol_type = other DNA
ctgcagcctaaagatgttgcaagttattac

SEQ ID NO: 621 - DNA, 30 bp, synthetic construct
  misc_feature 1..30: note = synthetic sequence
  source 1..30: mol_type = other DNA
ctggagcatgaagattttgcactttaacac

SEQ ID NO: 622 - DNA, 30 bp, synthetic construct
  misc_feature 1..30: note = synthetic sequence
  source 1..30: mol_type = other DNA
ctggaagctgaagatgctgcagcgtattac

SEQ ID NO: 623 - DNA, 30 bp, synthetic construct
  misc_feature 1..30: note = synthetic sequence
  source 1..30: mol_type = other DNA
atagaatctgaggatgctgcatattacttc

SEQ ID NO: 624 - DNA, 30 bp, synthetic construct
  misc_feature 1..30: note = synthetic sequence
  source 1..30: mol_type = other DNA
gtggaagctaatgatactgcaaattattac

SEQ ID NO: 625 - DNA, 30 bp, synthetic construct
  misc_feature 1..30: note = synthetic sequence
  source 1..30: mol_type = other DNA
ctgcaacctgaagattttgcaacttactac

SEQ ID NO: 626 - DNA, 30 bp, synthetic construct
  misc_feature 1..30: note = synthetic sequence
  source 1..30: mol_type = other DNA
ctgcaacctgaagatgttataacttattac

SEQ ID NO: 627 - DNA, 22 bp, synthetic construct
  misc_feature 1..22: note = synthetic sequence
  source 1..22: mol_type = other DNA
gccttcccacacaggttctccc

SEQ ID NO: 628 - DNA, 29 bp, synthetic construct
  misc_feature 1..29: note = synthetic sequence
  source 1..29: mol_type = other DNA
agagcctgaagattttgcagtgtattact

SEQ ID NO: 629 - DNA, 29 bp, synthetic construct
  misc_feature 1..29: note = synthetic sequence
  source 1..29: mol_type = other DNA
agagcctgaagattttgcagtttattact

SEQ ID NO: 630 - DNA, 29 bp, synthetic construct
  misc_feature 1..29: note = synthetic sequence
  source 1..29: mol_type = other DNA
agaatctgaggatgctgcatattacttct

SEQ ID NO: 631 - DNA, 29 bp, synthetic construct
  misc_feature 1..29: note = synthetic sequence
  source 1..29: mol_type = other DNA
ggagcatgaagattttgcactttaacact

SEQ ID NO: 632 - DNA, 29 bp, synthetic construct
  misc_feature 1..29: note = synthetic sequence
  source 1..29: mol_type = other DNA
ggaagctaatgatactgcaaattattact

SEQ ID NO: 633 - DNA, 29 bp, synthetic construct
  misc_feature 1..29: note = synthetic sequence
  source 1..29: mol_type = other DNA
ggagcctgaagattttgcagtttattact

SEQ ID NO: 634 - DNA, 29 bp, synthetic construct
  misc_feature 1..29: note = synthetic sequence
  source 1..29: mol_type = other DNA
ccagtctgaagttgctgcaacttcttatt

SEQ ID NO: 635 - DNA, 29 bp, synthetic construct
  misc_feature 1..29: note = synthetic sequence
  source 1..29: mol_type = other DNA
gcagcctgaagatgttgcaacttattacg

SEQ ID NO: 636 - DNA, 29 bp, synthetic construct
  misc_feature 1..29: note = synthetic sequence
  source 1..29: mol_type = other DNA
gcaggctgaagatgtggcagtttattact

SEQ ID NO: 637 - DNA, 29 bp, synthetic construct
  misc_feature 1..29: note = synthetic sequence
  source 1..29: mol_type = other DNA
gcagcctgatgattttgcaacttattact

SEQ ID NO: 638 - DNA, 29 bp, synthetic construct
  misc_feature 1..29: note = synthetic sequence
  source 1..29: mol_type = other DNA
gcaacctgaagattttgcaacttattact

SEQ ID NO: 639 - DNA, 29 bp, synthetic construct
  misc_feature 1..29: note = synthetic sequence
  source 1..29: mol_type = other DNA
ggaagctgaagatgctgcagcgtattact

SEQ ID NO: 640 - DNA, 29 bp, synthetic construct
  misc_feature 1..29: note = synthetic sequence
  source 1..29: mol_type = other DNA
gcaacctgaagattttgcaacttactact

SEQ ID NO: 641 - DNA, 29 bp, synthetic construct
  misc_feature 1..29: note = synthetic sequence
  source 1..29: mol_type = other DNA
gcagtctgaagattttgcaacttattact

SEQ ID NO: 642 - DNA, 29 bp, synthetic construct
  misc_feature 1..29: note = synthetic sequence
  source 1..29: mol_type = other DNA
gaagcctgaagattttgcagcttattact

SEQ ID NO: 643 - DNA, 29 bp, synthetic construct
  misc_feature 1..29: note = synthetic sequence
  source 1..29: mol_type = other DNA
gcagcctgaagatgttgcaacttattact

SEQ ID NO: 644 - DNA, 30 bp, synthetic construct
  misc_feature 1..30: note = synthetic sequence
  source 1..30: mol_type = other DNA
agaccctgaagatgtcacaattttattacc

SEQ ID NO: 645 - DNA, 29 bp, synthetic construct
  misc_feature 1..29: note = synthetic sequence
  source 1..29: mol_type = other DNA
ggaagctgaagatgctgcaacatattact

SEQ ID NO: 646 - DNA, 29 bp, synthetic construct
  misc_feature 1..29: note = synthetic sequence
  source 1..29: mol_type = other DNA
gcagcctaaagatgttgcaacttattact

SEQ ID NO: 647 - DNA, 29 bp, synthetic construct
  misc_feature 1..29: note = synthetic sequence
  source 1..29: mol_type = other DNA
ggagcctgaagattttgcagtctattact

SEQ ID NO: 648 - DNA, 29 bp, synthetic construct
  misc_feature 1..29: note = synthetic sequence
  source 1..29: mol_type = other DNA
ggaagctgaagatgctgcaacgtattact

SEQ ID NO: 649 - DNA, 29 bp, synthetic construct
  misc_feature 1..29: note = synthetic sequence
  source 1..29: mol_type = other DNA
gcagcctgaagatattgcaacatattact

SEQ ID NO: 650 - DNA, 28 bp, synthetic construct
  misc_feature 1..28: note = synthetic sequence
  source 1..28: mol_type = other DNA
ggagcctgaagatttgcacttcatcact

SEQ ID NO: 651 - DNA, 29 bp, synthetic construct
  misc_feature 1..29: note = synthetic sequence
  source 1..29: mol_type = other DNA
gcagcctaaagatgttgcaagttattact

SEQ ID NO: 652 - DNA, 29 bp, synthetic construct
  misc_feature 1..29: note = synthetic sequence
  source 1..29: mol_type = other DNA
gcagcctgaagattttgcagtttattact

SEQ ID NO: 653 - DNA, 28 bp, synthetic construct
  misc_feature 1..28: note = synthetic sequence
  source 1..28: mol_type = other DNA
gcaacctgaagatgttataacttattgc

SEQ ID NO: 654 - DNA, 29 bp, synthetic construct
  misc_feature 1..29: note = synthetic sequence
  source 1..29: mol_type = other DNA
gcagcctgaagattttgcaacttattact

SEQ ID NO: 655 - DNA, 29 bp, synthetic construct
  misc_feature 1..29: note = synthetic sequence
  source 1..29: mol_type = other DNA
gcaacctgaagatgttataacttattact

SEQ ID NO: 656 - DNA, 29 bp, synthetic construct
  misc_feature 1..29: note = synthetic sequence
  source 1..29: mol_type = other DNA
ggagcctgaagattttgcagtgtattact

SEQ ID NO: 657 - DNA, 29 bp, synthetic construct
  misc_feature 1..29: note = synthetic sequence
  source 1..29: mol_type = other DNA
gcagcctgaagattttgcaacttactatt

SEQ ID NO: 658 - DNA, 29 bp, synthetic construct
  misc_feature 1..29: note = synthetic sequence
  source 1..29: mol_type = other DNA
gcagtctgaagattttgcagtttattact

SEQ ID NO: 659 - DNA, 23 bp, synthetic construct
  misc_feature 1..23: note = synthetic sequence
  source 1..23: mol_type = other DNA
ctgccttcccacacaggttctcc

SEQ ID NO: 660 - DNA, 26 bp, synthetic construct
  misc_feature 1..26: note = synthetic sequence
  source 1..26: mol_type = other DNA
ctggagcctgaagatttgcacttcat

SEQ ID NO: 661 - DNA, 27 bp, synthetic construct
  misc_feature 1..27: note = synthetic sequence
  source 1..27: mol_type = other DNA
gtggaagctaatgatactgcaaattat

SEQ ID NO: 662 - DNA, 27 bp, synthetic construct
  misc_feature 1..27: note = synthetic sequence
  source 1..27: mol_type = other DNA
ctgcagcctgaagattttgcagtttat

SEQ ID NO: 663 - DNA, 27 bp, synthetic construct
  misc_feature 1..27: note = synthetic sequence
  source 1..27: mol_type = other DNA
ctggagcctgaagattttgcagtgtat

SEQ ID NO: 664 - DNA, 27 bp, synthetic construct
  misc_feature 1..27: note = synthetic sequence
  source 1..27: mol_type = other DNA
ctggagcctgaagattttgcagtttat

SEQ ID NO: 665 - DNA, 27 bp, synthetic construct
  misc_feature 1..27: note = synthetic sequence
  source 1..27: mol_type = other DNA
ctggaagctgaagatgctgcaacatat

SEQ ID NO: 666 - DNA, 27 bp, synthetic construct
  misc_feature 1..27: note = synthetic sequence
  source 1..27: mol_type = other DNA
ctgcagcctgaagattttgcaacttac

SEQ ID NO: 667 - DNA, 27 bp, synthetic construct
  misc_feature 1..27: note = synthetic sequence
  source 1..27: mol_type = other DNA
ctagagcctgaagattttgcagtttat

SEQ ID NO: 668 - DNA, 27 bp, synthetic construct
  misc_feature 1..27: note = synthetic sequence
  source 1..27: mol_type = other DNA
ctgcagtctgaagattttgcaacttat

SEQ ID NO: 669 - DNA, 27 bp, synthetic construct
  misc_feature 1..27: note = synthetic sequence
  source 1..27: mol_type = other DNA
ctgcagtctgaagattttgcagtttat

SEQ ID NO: 670 - DNA, 28 bp, synthetic construct
  misc_feature 1..28: note = synthetic sequence
  source 1..28: mol_type = other DNA
ctagaccctgaagatgtcacaattttat

SEQ ID NO: 671 - DNA, 27 bp, synthetic construct
  misc_feature 1..27: note = synthetic sequence
  source 1..27: mol_type = other DNA
ctggaagctgaagatgctgcagcgtat

SEQ ID NO: 672 - DNA, 27 bp, synthetic construct
  misc_feature 1..27: note = synthetic sequence
  source 1..27: mol_type = other DNA
ctggagcctgaagattttgcagtctat

SEQ ID NO: 673 - DNA, 27 bp, synthetic construct
  misc_feature 1..27: note = synthetic sequence
  source 1..27: mol_type = other DNA
ctggagcatgaagattttgcactttaa

SEQ ID NO: 674 - DNA, 27 bp, synthetic construct
  misc_feature 1..27: note = synthetic sequence
  source 1..27: mol_type = other DNA
ctgcagcctgatgattttgcaacttat

SEQ ID NO: 675 - DNA, 27 bp, synthetic construct
  misc_feature 1..27: note = synthetic sequence
  source 1..27: mol_type = other DNA
ctgcagcctaaagatgttgcaacttat

SEQ ID NO: 676 - DNA, 27 bp, synthetic construct
  misc_feature 1..27: note = synthetic sequence
  source 1..27: mol_type = other DNA
ctgcaggctgaagatgtggcagtttat

SEQ ID NO: 677 - DNA, 27 bp, synthetic construct
  misc_feature 1..27: note = synthetic sequence
  source 1..27: mol_type = other DNA
ctgcagcctgaagatgttgcaacttat

SEQ ID NO: 678 - DNA, 27 bp, synthetic construct
  misc_feature 1..27: note = synthetic sequence
  source 1..27: mol_type = other DNA
ctgcaacctgaagattttgcaacttac

SEQ ID NO: 679 - DNA, 27 bp, synthetic construct
  misc_feature 1..27: note = synthetic sequence
  source 1..27: mol_type = other DNA
atagaatctgaggatgctgcatattac

SEQ ID NO: 680 - DNA, 27 bp, synthetic construct
  misc_feature 1..27: note = synthetic sequence
  source 1..27: mol_type = other DNA
ctgcaacctgaagattttgcaacttat

SEQ ID NO: 681 - DNA, 27 bp, synthetic construct
  misc_feature 1..27: note = synthetic sequence
  source 1..27: mol_type = other DNA
ctgcagcctaaagatgttgcaagttat

SEQ ID NO: 682 - DNA, 27 bp, synthetic construct
  misc_feature 1..27: note = synthetic sequence
  source 1..27: mol_type = other DNA
ctgcagcctgaagattttgcaacttat

SEQ ID NO: 683 - DNA, 27 bp, synthetic construct
  misc_feature 1..27: note = synthetic sequence
  source 1..27: mol_type = other DNA
ctagagcctgaagattttgcagtgtat

SEQ ID NO: 684 - DNA, 27 bp, synthetic construct
  misc_feature 1..27: note = synthetic sequence
  source 1..27: mol_type = other DNA
ctgcaacctgaagatgttataacttat

SEQ ID NO: 685 - DNA, 27 bp, synthetic construct
  misc_feature 1..27: note = synthetic sequence
  source 1..27: mol_type = other DNA
ctgaagcctgaagattttgcagcttat

SEQ ID NO: 686 - DNA, 27 bp, synthetic construct
  misc_feature 1..27: note = synthetic sequence
  source 1..27: mol_type = other DNA
ctggaagctgaagatgctgcaacgtat

SEQ ID NO: 687 - DNA, 27 bp, synthetic construct
  misc_feature 1..27: note = synthetic sequence
  source 1..27: mol_type = other DNA
ctgcagcctgaagatattgcaacatat

SEQ ID NO: 688 - DNA, 27 bp, synthetic construct
  misc_feature 1..27: note = synthetic sequence
  source 1..27: mol_type = other DNA
ctccagtctgaagttgctgcaacttct

SEQ ID NO: 689 - DNA, 26 bp, synthetic construct
  misc_feature 1..26: note = synthetic sequence
  source 1..26: mol_type = other DNA
cagttttctgccttcccacacaggtt

SEQ ID NO: 690 - DNA, 22 bp, synthetic construct
  misc_feature 1..22: note = synthetic sequence
  source 1..22: mol_type = other DNA
cctgcagcctgaagattttgca

SEQ ID NO: 691 - DNA, 22 bp, synthetic construct
  misc_feature 1..22: note = synthetic sequence
  source 1..22: mol_type = other DNA
cctgcaggctgaagatgtggca

SEQ ID NO: 692 - DNA, 22 bp, synthetic construct
  misc_feature 1..22: note = synthetic sequence
  source 1..22: mol_type = other DNA
cctgcagcctgaagatgttgca

SEQ ID NO: 693 - DNA, 22 bp, synthetic construct
  misc_feature 1..22: note = synthetic sequence
  source 1..22: mol_type = other DNA
cctgcagtctgaagattttgca

SEQ ID NO: 694 - DNA, 22 bp, synthetic construct
  misc_feature 1..22: note = synthetic sequence
  source 1..22: mol_type = other DNA
actggagcctgaagattttgca

SEQ ID NO: 695 - DNA, 22 bp, synthetic construct
  misc_feature 1..22: note = synthetic sequence
  source 1..22: mol_type = other DNA
tgtggaagctaatgatactgca

SEQ ID NO: 696 - DNA, 22 bp, synthetic construct
  misc_feature 1..22: note = synthetic sequence
  source 1..22: mol_type = other DNA
cctgcagcctgatgattttgca

SEQ ID NO: 697 - DNA, 22 bp, synthetic construct
  misc_feature 1..22: note = synthetic sequence
  source 1..22: mol_type = other DNA
cctggaagctgaagatgctgca

SEQ ID NO: 698 - DNA, 22 bp, synthetic construct
  misc_feature 1..22: note = synthetic sequence
  source 1..22: mol_type = other DNA
cctagagcctgaagattttgca

SEQ ID NO: 699 - DNA, 22 bp, synthetic construct
  misc_feature 1..22: note = synthetic sequence
  source 1..22: mol_type = other DNA
cctgcagcctgaagatattgca

SEQ ID NO: 700 - DNA, 22 bp, synthetic construct
  misc_feature 1..22: note = synthetic sequence
  source 1..22: mol_type = other DNA
tctgcaacctgaagattttgca

SEQ ID NO: 701 - DNA, 22 bp, synthetic construct
  misc_feature 1..22: note = synthetic sequence
  source 1..22: mol_type = other DNA
gctggagcatgaagattttgca

SEQ ID NO: 702 - DNA, 22 bp, synthetic construct
  misc_feature 1..22: note = synthetic sequence
  source 1..22: mol_type = other DNA
cctgcagcctaaagatgttgca

SEQ ID NO: 703 - DNA, 22 bp, synthetic construct
  misc_feature 1..22: note = synthetic sequence
  source 1..22: mol_type = other DNA
cctccagtctgaagttgctgca

SEQ ID NO: 704 - DNA, 22 bp, synthetic construct
  misc_feature 1..22: note = synthetic sequence
  source 1..22: mol_type = other DNA
cctgcaacctgaagatgttata

SEQ ID NO: 705 - DNA, 21 bp, synthetic construct
  misc_feature 1..21: note = synthetic sequence
  source 1..21: mol_type = other DNA
gctggagcctgaagatttgca

SEQ ID NO: 706 - DNA, 22 bp, synthetic construct
  misc_feature 1..22: note = synthetic sequence
  source 1..22: mol_type = other DNA
cctagaccctgaagatgtcaca

SEQ ID NO: 707 - DNA, 22 bp, synthetic construct
  misc_feature 1..22: note = synthetic sequence
  source 1..22: mol_type = other DNA
catagaatctgaggatgctgca

SEQ ID NO: 708 - DNA, 22 bp, synthetic construct
  misc_feature 1..22: note = synthetic sequence
  source 1..22: mol_type = other DNA
cctgaagcctgaagattttgca

SEQ ID NO: 709 - DNA, 25 bp, synthetic construct
  misc_feature 1..25: note = synthetic sequence
  source 1..25: mol_type = other DNA
cagttttctgccttcccacacaggt

SEQ ID NO: 710 - DNA, 22 bp, synthetic construct
  misc_feature 1..22: note = synthetic sequence
  source 1..22: mol_type = other DNA
gggtggaggctgaggatattcg

SEQ ID NO: 711 - DNA, 22 bp, synthetic construct
  misc_feature 1..22: note = synthetic sequence
  source 1..22: mol_type = other DNA
ggacggagaccaaggatgttgg

SEQ ID NO: 712 - DNA, 22 bp, synthetic construct
  misc_feature 1..22: note = synthetic sequence
  source 1..22: mol_type = other DNA
gggtggaggctgaggatgttgg

SEQ ID NO: 713 - DNA, 22 bp, synthetic construct
  misc_feature 1..22: note = synthetic sequence
  source 1..22: mol_type = other DNA
ggacggagactaaggatgttgg

SEQ ID NO: 714 - DNA, 22 bp, synthetic construct
  misc_feature 1..22: note = synthetic sequence
  source 1..22: mol_type = other DNA
ggatggatgctgaggatgttgg

SEQ ID NO: 715 - DNA, 22 bp, synthetic construct
  misc_feature 1..22: note = synthetic sequence
  source 1..22: mol_type = other DNA
aagtggaggctgaggatgttgg

SEQ ID NO: 716 - DNA, 22 bp, synthetic construct
  misc_feature 1..22: note = synthetic sequence
  source 1..22: mol_type = other DNA
gagtggaggctgaggatgttgg

SEQ ID NO: 717 - DNA, 22 bp, synthetic construct
  misc_feature 1..22: note = synthetic sequence
  source 1..22: mol_type = other DNA
gggtggaggctgaggattttgg

SEQ ID NO: 718 - DNA, 22 bp, synthetic construct
  misc_feature 1..22: note = synthetic sequence
  source 1..22: mol_type = other DNA
gggtggaagctgaggatgtcgg

SEQ ID NO: 719 - DNA, 22 bp, synthetic construct
  misc_feature 1..22: note = synthetic sequence
  source 1..22: mol_type = other DNA
gggtagaggctgaggacgttgg

SEQ ID NO: 720 - DNA, 22 bp, synthetic construct
  misc_feature 1..22: note = synthetic sequence
  source 1..22: mol_type = other DNA
acatagaatctgaggatgctgc

SEQ ID NO: 721 - DNA, 22 bp, synthetic construct
  misc_feature 1..22: note = synthetic sequence
  source 1..22: mol_type = other DNA
ctgtggaagctaatgatactgc

SEQ ID NO: 722 - DNA, 22 bp, synthetic construct
  misc_feature 1..22: note = synthetic sequence
  source 1..22: mol_type = other DNA
acctgcagcctgaagattttgc

SEQ ID NO: 723 - DNA, 22 bp, synthetic construct
  misc_feature 1..22: note = synthetic sequence
  source 1..22: mol_type = other DNA
gcctgcagcctgaagattttgc

SEQ ID NO: 724 - DNA, 22 bp, synthetic construct
  misc_feature 1..22: note = synthetic sequence
  source 1..22: mol_type = other DNA
gtctgcaacctgaagattttgc

SEQ ID NO: 725 - DNA, 22 bp, synthetic construct
  misc_feature 1..22: note = synthetic sequence
  source 1..22: mol_type = other DNA
gcctgcaacctgaagatgttat

SEQ ID NO: 726 - DNA, 22 bp, synthetic construct
  misc_feature 1..22: note = synthetic sequence
  source 1..22: mol_type = other DNA
gcctgcaggctgaagatgtggc

SEQ ID NO: 727 - DNA, 22 bp, synthetic construct
  misc_feature 1..22: note = synthetic sequence
  source 1..22: mol_type = other DNA
tcctgcagtctgaagattttgc

SEQ ID NO: 728 - DNA, 22 bp, synthetic construct
  misc_feature 1..22: note = synthetic sequence
  source 1..22: mol_type = other DNA
tcctccagtctgaagttgctgc

SEQ ID NO: 729 - DNA, 22 bp, synthetic construct
  misc_feature 1..22: note = synthetic sequence
  source 1..22: mol_type = other DNA
gcctggaagctgaagatgctgc

SEQ ID NO: 730 - DNA, 22 bp, synthetic construct
  misc_feature 1..22: note = synthetic sequence
  source 1..22: mol_type = other DNA
gcctagagcctgaagattttgc

SEQ ID NO: 731 - DNA, 22 bp, synthetic construct
  misc_feature 1..22: note = synthetic sequence
  source 1..22: mol_type = other DNA
gcctgcagcctgatgattttgc

SEQ ID NO: 732 - DNA, 22 bp, synthetic construct
  misc_feature 1..22: note = synthetic sequence
  source 1..22: mol_type = other DNA
gactggagcctgaagattttgc

SEQ ID NO: 733 - DNA, 22 bp, synthetic construct
  misc_feature 1..22: note = synthetic sequence
  source 1..22: mol_type = other DNA
gcctgaagcctgaagattttgc

SEQ ID NO: 734 - DNA, 22 bp, synthetic construct
  misc_feature 1..22: note = synthetic sequence
  source 1..22: mol_type = other DNA
tcctgcagcctaaagatgttgc

SEQ ID NO: 735 - DNA, 22 bp, synthetic construct
  misc_feature 1..22: note = synthetic sequence
  source 1..22: mol_type = other DNA
gcctgcagtctgaagattttgc

SEQ ID NO: 736 - DNA, 22 bp, synthetic construct
  misc_feature 1..22: note = synthetic sequence
  source 1..22: mol_type = other DNA
ggctggagcatgaagattttgc

SEQ ID NO: 737 - DNA, 22 bp, synthetic construct
  misc_feature 1..22: note = synthetic sequence
  source 1..22: mol_type = other DNA
gcctagaccctgaagatgtcac

SEQ ID NO: 738 - DNA, 22 bp, synthetic construct
  misc_feature 1..22: note = synthetic sequence
  source 1..22: mol_type = other DNA
gcctgcagcctgaagatgttgc

SEQ ID NO: 739 - DNA, 22 bp, synthetic construct
  misc_feature 1..22: note = synthetic sequence
  source 1..22: mol_type = other DNA
gcctgcagcctgaagatattgc

SEQ ID NO: 740 - DNA, 21 bp, synthetic construct
  misc_feature 1..21: note = synthetic sequence
  source 1..21: mol_type = other DNA
ggctggagcctgaagatttgc

SEQ ID NO: 741 - DNA, 28 bp, synthetic construct
  misc_feature 1..28: note = synthetic sequence
  source 1..28: mol_type = other DNA
caatcagttttctgccttcccacacagg

SEQ ID NO: 742 - DNA, 22 bp, synthetic construct
  misc_feature 1..22: note = synthetic sequence
  source 1..22: mol_type = other DNA
cgggtggaggctgaggattttg

SEQ ID NO: 743 - DNA, 22 bp, synthetic construct
  misc_feature 1..22: note = synthetic sequence
  source 1..22: mol_type = other DNA
agggtggaggctgaggatgttg

SEQ ID NO: 744 - DNA, 22 bp, synthetic construct
  misc_feature 1..22: note = synthetic sequence
  source 1..22: mol_type = other DNA
agagtggaggctgaggatgttg

SEQ ID NO: 745 - DNA, 22 bp, synthetic construct
  misc_feature 1..22: note = synthetic sequence
  source 1..22: mol_type = other DNA
tgggtggaggctgaggatgttg

SEQ ID NO: 746 - DNA, 22 bp, synthetic construct
  misc_feature 1..22: note = synthetic sequence
  source 1..22: mol_type = other DNA
aggatggatgctgaggatgttg

SEQ ID NO: 747 - DNA, 22 bp, synthetic construct
  misc_feature 1..22: note = synthetic sequence
  source 1..22: mol_type = other DNA
cgggtggaggctgaggatgttg

SEQ ID NO: 748 - DNA, 22 bp, synthetic construct
  misc_feature 1..22: note = synthetic sequence
  source 1..22: mol_type = other DNA
aggacggagactaaggatgttg

SEQ ID NO: 749 - DNA, 22 bp, synthetic construct
  misc_feature 1..22: note = synthetic sequence
  source 1..22: mol_type = other DNA
aaagtggaggctgaggatgttg

SEQ ID NO: 750 - DNA, 22 bp, synthetic construct
  misc_feature 1..22: note = synthetic sequence
  source 1..22: mol_type = other DNA
agggtggaggctgaggatattc

SEQ ID NO: 751 - DNA, 22 bp, synthetic construct
  misc_feature 1..22: note = synthetic sequence
  source 1..22: mol_type = other DNA
agggtggaagctgaggatgtcg

SEQ ID NO: 752 - DNA, 22 bp, synthetic construct
  misc_feature 1..22: note = synthetic sequence
  source 1..22: mol_type = other DNA
agggtagaggctgaggacgttg

SEQ ID NO: 753 - DNA, 22 bp, synthetic construct
  misc_feature 1..22: note = synthetic sequence
  source 1..22: mol_type = other DNA
aggacggagaccaaggatgttg

SEQ ID NO: 754 - DNA, 30 bp, synthetic construct; identical to SEQ ID NO: 597
  misc_feature 1..30: note = synthetic sequence
  modified_base 15: mod_base = OTHER; note = uracil
  modified_base 28: mod_base = OTHER; note = uracil
  source 1..30: mol_type = other DNA

SEQ ID NO: 755 - DNA, 30 bp, synthetic construct; identical to SEQ ID NO: 598
  misc_feature 1..30: note = synthetic sequence
  modified_base 15: mod_base = OTHER; note = uracil
  modified_base 28: mod_base = OTHER; note = uracil
  source 1..30: mol_type = other DNA

SEQ ID NO: 756 - DNA, 30 bp, synthetic construct; identical to SEQ ID NO: 599
  misc_feature 1..30: note = synthetic sequence
  modified_base 15: mod_base = OTHER; note = uracil
  modified_base 28: mod_base = OTHER; note = uracil
  source 1..30: mol_type = other DNA

SEQ ID NO: 757 - DNA, 30 bp, synthetic construct; identical to SEQ ID NO: 600
  misc_feature 1..30: note = synthetic sequence
  modified_base 15: mod_base = OTHER; note = uracil
  modified_base 28: mod_base = OTHER; note = uracil
  source 1..30: mol_type = other DNA

SEQ ID NO: 758 - DNA, 30 bp, synthetic construct; identical to SEQ ID NO: 601
  misc_feature 1..30: note = synthetic sequence
  modified_base 15: mod_base = OTHER; note = uracil
  modified_base 28: mod_base = OTHER; note = uracil
  source 1..30: mol_type = other DNA

SEQ ID NO: 759 - DNA, 30 bp, synthetic construct; identical to SEQ ID NO: 602
  misc_feature 1..30: note = synthetic sequence
  modified_base 15: mod_base = OTHER; note = uracil
  modified_base 28: mod_base = OTHER; note = uracil
  source 1..30: mol_type = other DNA

SEQ ID NO: 760 - DNA, 29 bp, synthetic construct
  misc_feature 1..29: note = synthetic sequence
  modified_base 9: mod_base = OTHER; note = uracil
  modified_base 26: mod_base = OTHER; note = uracil
  source 1..29: mol_type = other DNA
ctggagcctgaagatttgcacttcatcac

SEQ ID NO: 761 - DNA, 30 bp, synthetic construct; identical to SEQ ID NO: 604
  misc_feature 1..30: note = synthetic sequence
  modified_base 15: mod_base = OTHER; note = uracil
  modified_base 28: mod_base = OTHER; note = uracil
  source 1..30: mol_type = other DNA

SEQ ID NO: 762 - DNA, 30 bp, synthetic construct; identical to SEQ ID NO: 605
  misc_feature 1..30: note = synthetic sequence
  modified_base 15: mod_base = OTHER; note = uracil
  modified_base 28: mod_base = OTHER; note = uracil
  source 1..30: mol_type = other DNA

SEQ ID NO: 763 - DNA, 30 bp, synthetic construct; identical to SEQ ID NO: 606
  misc_feature 1..30: note = synthetic sequence
  modified_base 15: mod_base = OTHER; note = uracil
  modified_base 28: mod_base = OTHER; note = uracil
  source 1..30: mol_type = other DNA

SEQ ID NO: 764 - DNA, 30 bp, synthetic construct; identical to SEQ ID NO: 607
  misc_feature 1..30: note = synthetic sequence
  modified_base 15: mod_base = OTHER; note = uracil
  modified_base 28: mod_base = OTHER; note = uracil
  source 1..30: mol_type = other DNA

SEQ ID NO: 765 - DNA, 30 bp, synthetic construct; identical to SEQ ID NO: 608
  misc_feature 1..30: note = synthetic sequence
  modified_base 15: mod_base = OTHER; note = uracil
  modified_base 28: mod_base = OTHER; note = uracil
  source 1..30: mol_type = other DNA

SEQ ID NO: 766 - DNA, 30 bp, synthetic construct; identical to SEQ ID NO: 609
  misc_feature 1..30: note = synthetic sequence
  modified_base 15: mod_base = OTHER; note = uracil
  modified_base 28: mod_base = OTHER; note = uracil
  source 1..30: mol_type = other DNA

SEQ ID NO: 767 - DNA, 30 bp, synthetic construct; identical to SEQ ID NO: 610
  misc_feature 1..30: note = synthetic sequence
  modified_base 15: mod_base = OTHER; note = uracil
  modified_base 28: mod_base = OTHER; note = uracil
  source 1..30: mol_type = other DNA

SEQ ID NO: 768 - DNA, 30 bp, synthetic construct; identical to SEQ ID NO: 611
  misc_feature 1..30: note = synthetic sequence
  modified_base 12: mod_base = OTHER; note = uracil
  modified_base 28: mod_base = OTHER; note = uracil
  source 1..30: mol_type = other DNA

SEQ ID NO: 769 - DNA, 30 bp, synthetic construct; identical to SEQ ID NO: 612
  misc_feature 1..30: note = synthetic sequence
  modified_base 15: mod_base = OTHER; note = uracil
  modified_base 28: mod_base = OTHER; note = uracil
  source 1..30: mol_type = other DNA

SEQ ID NO: 770 - DNA, 30 bp, synthetic construct; identical to SEQ ID NO: 613
  misc_feature 1..30: note = synthetic sequence
  modified_base 14: mod_base = OTHER; note = uracil
  modified_base 28: mod_base = OTHER; note = uracil
  source 1..30: mol_type = other DNA

SEQ ID NO: 771 - DNA, 30 bp, synthetic construct; identical to SEQ ID NO: 614
  misc_feature 1..30: note = synthetic sequence
  modified_base 15: mod_base = OTHER; note = uracil
  modified_base 28: mod_base = OTHER; note = uracil
  source 1..30: mol_type = other DNA

SEQ ID NO: 772 - DNA, 30 bp, synthetic construct; identical to SEQ ID NO: 615
  misc_feature 1..30: note = synthetic sequence
  modified_base 15: mod_base = OTHER; note = uracil
  modified_base 28: mod_base = OTHER; note = uracil
  source 1..30: mol_type = other DNA

SEQ ID NO: 773 - DNA, 30 bp, synthetic construct; identical to SEQ ID NO: 616
  misc_feature 1..30: note = synthetic sequence
  modified_base 15: mod_base = OTHER; note = uracil
  modified_base 28: mod_base = OTHER; note = uracil
  source 1..30: mol_type = other DNA

SEQ ID NO: 774 - DNA, 31 bp, synthetic construct; identical to SEQ ID NO: 617
  misc_feature 1..31: note = synthetic sequence
  modified_base 15: mod_base = OTHER; note = uracil
  modified_base 29: mod_base = OTHER; note = uracil
  source 1..31: mol_type = other DNA

SEQ ID NO: 775 - DNA, 30 bp, synthetic construct; identical to SEQ ID NO: 618
  misc_feature 1..30: note = synthetic sequence
  modified_base 15: mod_base = OTHER; note = uracil
  modified_base 28: mod_base = OTHER; note = uracil
  source 1..30: mol_type = other DNA

SEQ ID NO: 776 - DNA, 30 bp, synthetic construct; identical to SEQ ID NO: 619
  misc_feature 1..30: note = synthetic sequence
  modified_base 15: mod_base = OTHER; note = uracil
  modified_base 28: mod_base = OTHER; note = uracil
  source 1..30: mol_type = other DNA

SEQ ID NO: 777 - DNA, 30 bp, synthetic construct; identical to SEQ ID NO: 620
  misc_feature 1..30: note = synthetic sequence
  modified_base 15: mod_base = OTHER; note = uracil
  modified_base 28: mod_base = OTHER; note = uracil
  source 1..30: mol_type = other DNA

SEQ ID NO: 778 - DNA, 30 bp, synthetic construct; identical to SEQ ID NO: 621
  misc_feature 1..30: note = synthetic sequence
  modified_base 9: mod_base = OTHER; note = uracil
  modified_base 25: mod_base = OTHER; note = uracil
  source 1..30: mol_type = other DNA

SEQ ID NO: 779 - DNA, 30 bp, synthetic construct; identical to SEQ ID NO: 622
  misc_feature 1..30: note = synthetic sequence
  modified_base 15: mod_base = OTHER; note = uracil
  modified_base 28: mod_base = OTHER; note = uracil
  source 1..30: mol_type = other DNA

SEQ ID NO: 780 - DNA, 30 bp, synthetic construct; identical to SEQ ID NO: 623
  misc_feature 1..30: note = synthetic sequence
  modified_base 15: mod_base = OTHER; note = uracil
  modified_base 29: mod_base = OTHER; note = uracil
  source 1..30: mol_type = other DNA

SEQ ID NO: 781 - DNA, 30 bp, synthetic construct; identical to SEQ ID NO: 624
  misc_feature 1..30: note = synthetic sequence
  modified_base 12: mod_base = OTHER; note = uracil
  modified_base 28: mod_base = OTHER; note = uracil
  source 1..30: mol_type = other DNA

SEQ ID NO: 782 - DNA, 30 bp, synthetic construct; identical to SEQ ID NO: 625
  misc_feature 1..30: note = synthetic sequence
  modified_base 15: mod_base = OTHER; note = uracil
  modified_base 28: mod_base = OTHER; note = uracil
  source 1..30: mol_type = other DNA

SEQ ID NO: 783 - DNA, 30 bp, synthetic construct; identical to SEQ ID NO: 626
  misc_feature 1..30: note = synthetic sequence
  modified_base 15: mod_base = OTHER; note = uracil
  modified_base 28: mod_base = OTHER; note = uracil
  source 1..30: mol_type = other DNA

SEQ ID NO: 784 - DNA, 22 bp, synthetic construct
  misc_feature 1..22: note = synthetic sequence
  modified_base 5: mod_base = OTHER; note = uracil
  modified_base 19: mod_base = OTHER; note = uracil
  source 1..22: mol_type = other DNA
gccttcccacacaggttctccc

SEQ ID NO: 785 - DNA, 29 bp, synthetic construct
  misc_feature 1..29: note = synthetic sequence
  modified_base 13: mod_base = OTHER; note = uracil
  modified_base 26: mod_base = OTHER; note = uracil
  source 1..29: mol_type = other DNA
agagcctgaagattttgcagtgtattact

SEQ ID NO: 786 - DNA, 29 bp, synthetic construct
  misc_feature 1..29: note = synthetic sequence
  modified_base 13: mod_base = OTHER; note = uracil
  modified_base 26: mod_base = OTHER; note = uracil
  source 1..29: mol_type = other DNA
agagcctgaagattttgcagtttattact

SEQ ID NO: 787 - DNA, 29 bp, synthetic construct
  misc_feature 1..29: note = synthetic sequence
  modified_base 13: mod_base = OTHER; note = uracil
  modified_base 27: mod_base = OTHER; note = uracil
  source 1..29: mol_type = other DNA
agaatctgaggatgctgcatattacttct

SEQ ID NO: 788 - DNA, 29 bp, synthetic construct
  misc_feature 1..29: note = synthetic sequence
  modified_base 13: mod_base = OTHER; note = uracil
  modified_base 23: mod_base = OTHER; note = uracil
  source 1..29: mol_type = other DNA
ggagcatgaagattttgcactttaacact

SEQ ID NO: 789 - DNA, 29 bp, synthetic construct
  misc_feature 1..29: note = synthetic sequence
  modified_base 13: mod_base = OTHER; note = uracil
  modified_base 26: mod_base = OTHER; note = uracil
  source 1..29: mol_type = other DNA
ggaagctaatgatactgcaaattattact

SEQ ID NO: 790 - DNA, 29 bp, synthetic construct
  misc_feature 1..29: note = synthetic sequence
  modified_base 13: mod_base = OTHER; note = uracil
  modified_base 26: mod_base = OTHER; note = uracil
  source 1..29: mol_type = other DNA
ggagcctgaagattttgcagtttattact

SEQ ID NO: 791 - DNA, 29 bp, synthetic construct
  misc_feature 1..29: note = synthetic sequence
  modified_base 13: mod_base = OTHER; note = uracil
  modified_base 28: mod_base = OTHER; note = uracil
  source 1..29: mol_type = other DNA
ccagtctgaagttgctgcaacttcttatt

SEQ ID NO: 792 - DNA, 29 bp, synthetic construct
  misc_feature 1..29: note = synthetic sequence
  modified_base 13: mod_base = OTHER; note = uracil
  modified_base 26: mod_base = OTHER; note = uracil
  source 1..29: mol_type = other DNA
gcagcctgaagatgttgcaacttattacg

SEQ ID NO: 793 - DNA, 29 bp, synthetic construct
  misc_feature 1..29: note = synthetic sequence
  modified_base 13: mod_base = OTHER; note = uracil
  modified_base 26: mod_base = OTHER; note = uracil
  source 1..29: mol_type = other DNA
gcaggctgaagatgtggcagtttattact

SEQ ID NO: 794 - DNA, 29 bp, synthetic construct
  misc_feature 1..29: note = synthetic sequence
  modified_base 10: mod_base = OTHER; note = uracil
  modified_base 26: mod_base = OTHER; note = uracil
  source 1..29: mol_type = other DNA
gcagcctgatgattttgcaacttattact

SEQ ID NO: 795 - DNA, 29 bp, synthetic construct
  misc_feature 1..29: note = synthetic sequence
  modified_base 13: mod_base = OTHER; note = uracil
  modified_base 26: mod_base = OTHER; note = uracil
  source 1..29: mol_type = other DNA
gcaacctgaagattttgcaacttattact

SEQ ID NO: 796 - DNA, 29 bp, synthetic construct
  misc_feature 1..29: note = synthetic sequence
  modified_base 13: mod_base = OTHER; note = uracil
  modified_base 26: mod_base = OTHER; note = uracil
  source 1..29: mol_type = other DNA
ggaagctgaagatgctgcagcgtattact

SEQ ID NO: 797 - DNA, 29 bp, synthetic construct
  misc_feature 1..29: note = synthetic sequence
  modified_base 13: mod_base = OTHER; note = uracil
  modified_base 26: mod_base = OTHER; note = uracil
  source 1..29: mol_type = other DNA
gcaacctgaagattttgcaacttactact

SEQ ID NO: 798 - DNA, 29 bp, synthetic construct
  misc_feature 1..29: note = synthetic sequence
  modified_base 13: mod_base = OTHER; note = uracil
  modified_base 26: mod_base = OTHER; note = uracil
  source 1..29: mol_type = other DNA
gcagtctgaagattttgcaacttattact

SEQ ID NO: 799 - DNA, 29 bp, synthetic construct
  misc_feature 1..29: note = synthetic sequence
  modified_base 13: mod_base = OTHER; note = uracil
  modified_base 26: mod_base = OTHER; note = uracil
  source 1..29: mol_type = other DNA
gaagcctgaagattttgcagcttattact

SEQ ID NO: 800 - DNA, 29 bp, synthetic construct
  misc_feature 1..29: note = synthetic sequence
  modified_base 13: mod_base = OTHER; note = uracil
  modified_base 26: mod_base = OTHER; note = uracil
  source 1..29: mol_type = other DNA
gcagcctgaagatgttgcaacttattact

SEQ ID NO: 801 - DNA, 30 bp, synthetic construct; identical to SEQ ID NO: 644
  misc_feature 1..30: note = synthetic sequence
  modified_base 13: mod_base = OTHER; note = uracil
  modified_base 27: mod_base = OTHER; note = uracil
  source 1..30: mol_type = other DNA

SEQ ID NO: 802 - DNA, 29 bp, synthetic construct
  misc_feature 1..29: note = synthetic sequence
  modified_base 13: mod_base = OTHER; note = uracil
  modified_base 26: mod_base = OTHER; note = uracil
  source 1..29: mol_type = other DNA
ggaagctgaagatgctgcaacatattact

SEQ ID NO: 803 - DNA, 29 bp, synthetic construct
  misc_feature 1..29: note = synthetic sequence
  modified_base 13: mod_base = OTHER; note = uracil
  modified_base 26: mod_base = OTHER; note = uracil
  source 1..29: mol_type = other DNA
gcagcctaaagatgttgcaacttattact

SEQ ID NO: 804 - DNA, 29 bp, synthetic construct
  misc_feature 1..29: note = synthetic sequence
  modified_base 13: mod_base = OTHER; note = uracil
  modified_base 26: mod_base = OTHER; note = uracil
  source 1..29: mol_type = other DNA
ggagcctgaagattttgcagtctattact

SEQ ID NO: 805 - DNA, 29 bp, synthetic construct
  misc_feature 1..29: note = synthetic sequence
  modified_base 13: mod_base = OTHER; note = uracil
  modified_base 26: mod_base = OTHER; note = uracil
  source 1..29: mol_type = other DNA
ggaagctgaagatgctgcaacgtattact

SEQ ID NO: 806 - DNA, 29 bp, synthetic construct
  misc_feature 1..29: note = synthetic sequence
  modified_base 13: mod_base = OTHER; note = uracil
  modified_base 26: mod_base = OTHER; note = uracil
  source 1..29: mol_type = other DNA
gcagcctgaagatattgcaacatattact

SEQ ID NO: 807 - DNA, 28 bp, synthetic construct
  misc_feature 1..28: note = synthetic sequence
  modified_base 13: mod_base = OTHER; note = uracil
  modified_base 24: mod_base = OTHER; note = uracil
  source 1..28: mol_type = other DNA
ggagcctgaagatttgcacttcatcact

SEQ ID NO: 808 - DNA, 29 bp, synthetic construct
  misc_feature 1..29: note = synthetic sequence
  modified_base 13: mod_base = OTHER; note = uracil
  modified_base 26: mod_base = OTHER; note = uracil
  source 1..29: mol_type = other DNA
gcagcctaaagatgttgcaagttattact

SEQ ID NO: 809 - DNA, 29 bp, synthetic construct
  misc_feature 1..29: note = synthetic sequence
  modified_base 13: mod_base = OTHER; note = uracil
  modified_base 26: mod_base = OTHER; note = uracil
  source 1..29: mol_type = other DNA
gcagcctgaagattttgcagtttattact

SEQ ID NO: 810 - DNA, 28 bp, synthetic construct
  misc_feature 1..28: note = synthetic sequence
  modified_base 13: mod_base = OTHER; note = uracil
  modified_base 26: mod_base = OTHER; note = uracil
  source 1..28: mol_type = other DNA
gcaacctgaagatgttataacttattgc

SEQ ID NO: 811 - DNA, 29 bp, synthetic construct
  misc_feature 1..29: note = synthetic sequence
  modified_base 13: mod_base = OTHER; note = uracil
  modified_base 26: mod_base = OTHER; note = uracil
  source 1..29: mol_type = other DNA
gcagcctgaagattttgcaacttattact

SEQ ID NO: 812 - DNA, 29 bp, synthetic construct
  misc_feature 1..29: note = synthetic sequence
  modified_base 13: mod_base = OTHER; note = uracil
  modified_base 26: mod_base = OTHER; note = uracil
  source 1..29: mol_type = other DNA
gcaacctgaagatgttataacttattact

SEQ ID NO: 813 - DNA, 29 bp, synthetic construct
  misc_feature 1..29: note = synthetic sequence
  modified_base 13: mod_base = OTHER; note = uracil
  modified_base 26: mod_base = OTHER; note = uracil
  source 1..29: mol_type = other DNA
ggagcctgaagattttgcagtgtattact

SEQ ID NO: 814 - DNA, 29 bp, synthetic construct
  misc_feature 1..29: note = synthetic sequence
  modified_base 13: mod_base = OTHER; note = uracil
  modified_base 28: mod_base = OTHER; note = uracil
  source 1..29: mol_type = other DNA
gcagcctgaagattttgcaacttactatt

SEQ ID NO: 815 - DNA, 29 bp, synthetic construct
  misc_feature 1..29: note = synthetic sequence
  modified_base 13: mod_base = OTHER; note = uracil
  modified_base 26: mod_base = OTHER; note = uracil
  source 1..29: mol_type = other DNA
gcagtctgaagattttgcagtttattact

SEQ ID NO: 816 - DNA, 23 bp, synthetic construct
  misc_feature 1..23: note = synthetic sequence
  modified_base 7: mod_base = OTHER; note = uracil
  modified_base 21: mod_base = OTHER; note = uracil
  source 1..23: mol_type = other DNA
ctgccttcccacacaggttctcc

SEQ ID NO: 817 - DNA, 26 bp, synthetic construct
  misc_feature 1..26: note = synthetic sequence
  modified_base 9: mod_base = OTHER; note = uracil
  modified_base 23: mod_base = OTHER; note = uracil
  source 1..26: mol_type = other DNA
ctggagcctgaagatttgcacttcat

SEQ ID NO: 818 - DNA, 27 bp, synthetic construct
  misc_feature 1..27: note = synthetic sequence
  modified_base 12: mod_base = OTHER; note = uracil
  modified_base 25: mod_base = OTHER; note = uracil
  source 1..27: mol_type = other DNA
gtggaagctaatgatactgcaaattat

SEQ ID NO: 819 - DNA, 27 bp, synthetic construct
  misc_feature 1..27: note = synthetic sequence
  modified_base 9: mod_base = OTHER; note = uracil
  modified_base 25: mod_base = OTHER; note = uracil
  source 1..27: mol_type = other DNA
ctgcagcctgaagattttgcagtttat

SEQ ID NO: 820 - DNA, 27 bp, synthetic construct
  misc_feature 1..27: note = synthetic sequence
  modified_base 9: mod_base = OTHER; note = uracil
  modified_base 25: mod_base = OTHER; note = uracil
  source 1..27: mol_type = other DNA
ctggagcctgaagattttgcagtgtat

SEQ ID NO: 821 - DNA, 27 bp, synthetic construct
  misc_feature 1..27: note = synthetic sequence
  modified_base 9: mod_base = OTHER; note = uracil
  modified_base 25: mod_base = OTHER; note = uracil
  source 1..27: mol_type = other DNA
ctggagcctgaagattttgcagtttat

SEQ ID NO: 822 - DNA, 27 bp, synthetic construct
  misc_feature 1..27: note = synthetic sequence
  modified_base 15: mod_base = OTHER; note = uracil
  modified_base 25: mod_base = OTHER; note = uracil
  source 1..27: mol_type = other DNA
ctggaagctgaagatgctgcaacatat

SEQ ID NO: 823 - DNA, 27 bp, synthetic construct
  misc_feature 1..27: note = synthetic sequence
  modified_base 9: mod_base = OTHER; note = uracil
  modified_base 25: mod_base = OTHER; note = uracil
  source 1..27: mol_type = other DNA
ctgcagcctgaagattttgcaacttac

SEQ ID NO: 824 - DNA, 27 bp, synthetic construct
  misc_feature 1..27: note = synthetic sequence
  modified_base 9: mod_base = OTHER; note = uracil
  modified_base 25: mod_base = OTHER; note = uracil
  source 1..27: mol_type = other DNA
ctagagcctgaagattttgcagtttat

SEQ ID NO: 825 - DNA, 27 bp, synthetic construct
  misc_feature 1..27: note = synthetic sequence
  modified_base 9: mod_base = OTHER; note = uracil
  modified_base 25: mod_base = OTHER; note = uracil
  source 1..27: mol_type = other DNA
ctgcagtctgaagattttgcaacttat

SEQ ID NO: 826 - DNA, 27 bp, synthetic construct
  misc_feature 1..27: note = synthetic sequence
  modified_base 9: mod_base = OTHER; note = uracil
  modified_base 25: mod_base = OTHER; note = uracil
  source 1..27: mol_type = other DNA
ctgcagtctgaagattttgcagtttat

SEQ ID NO: 827 - DNA, 28 bp, synthetic construct
  misc_feature 1..28: note = synthetic sequence
  modified_base 9: mod_base = OTHER; note = uracil
  modified_base 26: mod_base = OTHER; note = uracil
  source 1..28: mol_type = other DNA
ctagaccctgaagatgtcacaattttat

SEQ ID NO: 828 - DNA, 27 bp, synthetic construct
  misc_feature 1..27: note = synthetic sequence
  modified_base 15: mod_base = OTHER; note = uracil
  modified_base 25: mod_base = OTHER; note = uracil
  source 1..27: mol_type = other DNA
ctggaagctgaagatgctgcagcgtat

SEQ ID NO: 829 - DNA, 27 bp, synthetic construct
  misc_feature 1..27: note = synthetic sequence
  modified_base 9: mod_base = OTHER; note = uracil
  modified_base 25: mod_base = OTHER; note = uracil
  source 1..27: mol_type = other DNA
ctggagcctgaagattttgcagtctat

SEQ ID NO: 830 - DNA, 27 bp, synthetic construct
  misc_feature 1..27: note = synthetic sequence
  modified_base 9: mod_base = OTHER; note = uracil
  modified_base 25: mod_base = OTHER; note = uracil
  source 1..27: mol_type = other DNA
ctggagcatgaagattttgcactttaa

SEQ ID NO: 831 - DNA, 27 bp, synthetic construct
  misc_feature 1..27: note = synthetic sequence
  modified_base 12: mod_base = OTHER; note = uracil
  modified_base 25: mod_base = OTHER; note = uracil
  source 1..27: mol_type = other DNA
ctgcagcctgatgattttgcaacttat

SEQ ID NO: 832 - DNA, 27 bp, synthetic construct
  misc_feature 1..27: note = synthetic sequence
  modified_base 9: mod_base = OTHER; note = uracil
  modified_base 25: mod_base = OTHER; note = uracil
  source 1..27: mol_type = other DNA
ctgcagcctaaagatgttgcaacttat

SEQ ID NO: 833 - DNA, 27 bp, synthetic construct
  misc_feature 1..27: note = synthetic sequence
  modified_base 9: mod_base = OTHER; note = uracil
  modified_base 25: mod_base = OTHER; note = uracil
  source 1..27: mol_type = other DNA
ctgcaggctgaagatgtggcagtttat

SEQ ID NO: 834 - DNA, 27 bp, synthetic construct
  misc_feature 1..27: note = synthetic sequence
  modified_base 9: mod_base = OTHER; note = uracil
  modified_base 25: mod_base = OTHER; note = uracil
  source 1..27: mol_type = other DNA
ctgcagcctgaagatgttgcaacttat

SEQ ID NO: 835 - DNA, 27 bp, synthetic construct
  misc_feature 1..27: note = synthetic sequence
  modified_base 9: mod_base = OTHER; note = uracil
  modified_base 25: mod_base = OTHER; note = uracil
  source 1..27: mol_type = other DNA
ctgcaacctgaagattttgcaacttac

SEQ ID NO: 836 - DNA, 27 bp, synthetic construct
  misc_feature 1..27: note = synthetic sequence
  modified_base 15: mod_base = OTHER; note = uracil
  modified_base 25: mod_base = OTHER; note = uracil
  source 1..27: mol_type = other DNA
atagaatctgaggatgctgcatattac

SEQ ID NO: 837 - DNA, 27 bp, synthetic construct
  misc_feature 1..27: note = synthetic sequence
  modified_base 9: mod_base = OTHER; note = uracil
  modified_base 25: mod_base = OTHER; note = uracil
  source 1..27: mol_type = other DNA
ctgcaacctgaagattttgcaacttat

SEQ ID NO: 838 - DNA, 27 bp, synthetic construct
  misc_feature 1..27: note = synthetic sequence
  modified_base 9: mod_base = OTHER; note = uracil
  modified_base 25: mod_base = OTHER; note = uracil
  source 1..27: mol_type = other DNA
ctgcagcctaaagatgttgcaagttat

SEQ ID NO: 839 - DNA, 27 bp, synthetic construct
  misc_feature 1..27: note = synthetic sequence
  modified_base 9: mod_base = OTHER; note = uracil
  modified_base 25: mod_base = OTHER; note = uracil
  source 1..27: mol_type = other DNA
ctgcagcctgaagattttgcaacttat

SEQ ID NO: 840 - DNA, 27 bp, synthetic construct
  misc_feature 1..27: note = synthetic sequence
  modified_base 9: mod_base = OTHER; note = uracil
  modified_base 25: mod_base = OTHER; note = uracil
  source 1..27: mol_type = other DNA
ctagagcctgaagattttgcagtgtat

SEQ ID NO: 841 - DNA, 27 bp, synthetic construct
  misc_feature 1..27: note = synthetic sequence
  modified_base 9: mod_base = OTHER; note = uracil
  modified_base 25: mod_base = OTHER; note = uracil
  source 1..27: mol_type = other DNA
ctgcaacctgaagatgttataacttat

SEQ ID NO: 842 - DNA, 27 bp, synthetic construct
  misc_feature 1..27: note = synthetic sequence
  modified_base 9: mod_base = OTHER; note = uracil
  modified_base 25: mod_base = OTHER; note = uracil
  source 1..27: mol_type = other DNA
ctgaagcctgaagattttgcagcttat

SEQ ID NO: 843 - DNA, 27 bp, synthetic construct
  misc_feature 1..27: note = synthetic sequence
  modified_base 15: mod_base = OTHER; note = uracil
  modified_base 25: mod_base = OTHER; note = uracil
  source 1..27: mol_type = other DNA
ctggaagctgaagatgctgcaacgtat

SEQ ID NO: 844 - DNA, 27 bp, synthetic construct
  misc_feature 1..27: note = synthetic sequence
  modified_base 9: mod_base = OTHER; note = uracil
  modified_base 25: mod_base = OTHER; note = uracil
  source 1..27: mol_type = other DNA
ctgcagcctgaagatattgcaacatat

SEQ ID NO: 845 - DNA, 27 bp, synthetic construct
  misc_feature 1..27: note = synthetic sequence
  modified_base 14: mod_base = OTHER; note = uracil
  modified_base 25: mod_base = OTHER; note = uracil
  source 1..27: mol_type = other DNA
ctccagtctgaagttgctgcaacttct

SEQ ID NO: 846 - DNA, 26 bp, synthetic construct
  misc_feature 1..26: note = synthetic sequence
  modified_base 13: mod_base = OTHER; note = uracil
  modified_base 25: mod_base = OTHER; note = uracil
  source 1..26: mol_type = other DNA
cagttttctgccttcccacacaggtt

SEQ ID NO: 847 - DNA, 22 bp, synthetic construct
  misc_feature 1..22: note = synthetic sequence
  modified_base 10: mod_base = OTHER; note = uracil
  modified_base 19: mod_base = OTHER; note = uracil
  source 1..22: mol_type = other DNA
cctgcagcctgaagattttgca

SEQ ID NO: 848 - DNA, 22 bp, synthetic construct
  misc_feature 1..22: note = synthetic sequence
  modified_base 10: mod_base = OTHER; note = uracil
  modified_base 18: mod_base = OTHER; note = uracil
  source 1..22: mol_type = other DNA
cctgcaggctgaagatgtggca

SEQ ID NO: 849 - DNA, 22 bp, synthetic construct
  misc_feature 1..22: note = synthetic sequence
  modified_base 10: mod_base = OTHER; note = uracil
  modified_base 19: mod_base = OTHER; note = uracil
  source 1..22: mol_type = other DNA
cctgcagcctgaagatgttgca

SEQ ID NO: 850 - DNA, 22 bp, synthetic construct
  misc_feature 1..22: note = synthetic sequence
  modified_base 8: mod_base = OTHER; note = uracil
  modified_base 19: mod_base = OTHER; note = uracil
  source 1..22: mol_type = other DNA
cctgcagtctgaagattttgca

SEQ ID NO: 851 - DNA, 22 bp, synthetic construct
  misc_feature 1..22: note = synthetic sequence
  modified_base 10: mod_base = OTHER; note = uracil
  modified_base 19: mod_base = OTHER; note = uracil
  source 1..22: mol_type = other DNA
actggagcctgaagattttgca

SEQ ID NO: 852 - DNA, 22 bp, synthetic construct
  misc_feature 1..22: note = synthetic sequence
  modified_base 10: mod_base = OTHER; note = uracil
  modified_base 19: mod_base = OTHER; note = uracil
  source 1..22: mol_type = other DNA
tgtggaagctaatgatactgca

SEQ ID NO: 853 - DNA, 22 bp, synthetic construct
  misc_feature 1..22: note = synthetic sequence
  modified_base 10: mod_base = OTHER; note = uracil
  modified_base 19: mod_base = OTHER; note = uracil
  source 1..22: mol_type = other DNA
cctgcagcctgatgattttgca

SEQ ID NO: 854 - DNA, 22 bp, synthetic construct
  misc_feature 1..22: note = synthetic sequence
  modified_base 10: mod_base = OTHER; note = uracil
  modified_base 19: mod_base = OTHER; note = uracil
  source 1..22: mol_type = other DNA
cctggaagctgaagatgctgca

SEQ ID NO: 855 - DNA, 22 bp, synthetic construct
  misc_feature 1..22: note = synthetic sequence
  modified_base 10: mod_base = OTHER; note = uracil
  modified_base 19: mod_base = OTHER; note = uracil
  source 1..22: mol_type = other DNA
cctagagcctgaagattttgca

SEQ ID NO: 856 - DNA, 22 bp, synthetic construct
  misc_feature 1..22: note = synthetic sequence
  modified_base 10: mod_base = OTHER; note = uracil
  modified_base 19: mod_base = OTHER; note = uracil
  source 1..22: mol_type = other DNA
cctgcagcctgaagatattgca

SEQ ID NO: 857 - DNA, 22 bp, synthetic construct
  misc_feature 1..22: note = synthetic sequence
  modified_base 10: mod_base = OTHER; note = uracil
  modified_base 19: mod_base = OTHER; note = uracil
  source 1..22: mol_type = other DNA
tctgcaacctgaagattttgca

SEQ ID NO: 858 - DNA, 22 bp, synthetic construct
  misc_feature 1..22: note = synthetic sequence
  modified_base 10: mod_base = OTHER; note = uracil
  modified_base 19: mod_base = OTHER; note = uracil
  source 1..22: mol_type = other DNA
gctggagcatgaagattttgca

SEQ ID NO: 859 - DNA, 22 bp, synthetic construct
  misc_feature 1..22: note = synthetic sequence
  modified_base 10: mod_base = OTHER; note = uracil
  modified_base 19: mod_base = OTHER; note = uracil
  source 1..22: mol_type = other DNA
cctgcagcctaaagatgttgca

SEQ ID NO: 860 - DNA, 22 bp, synthetic construct
  misc_feature 1..22: note = synthetic sequence
  modified_base 8: mod_base = OTHER; note = uracil
  modified_base 19: mod_base = OTHER; note = uracil
  source 1..22: mol_type = other DNA
cctccagtctgaagttgctgca

SEQ ID NO: 861 - DNA, 22 bp, synthetic construct
  misc_feature 1..22: note = synthetic sequence
  modified_base 10: mod_base = OTHER; note = uracil
  modified_base 21: mod_base = OTHER; note = uracil
  source 1..22: mol_type = other DNA
cctgcaacctgaagatgttata

SEQ ID NO: 862 - DNA, 21 bp, synthetic construct
  misc_feature 1..21: note = synthetic sequence
  modified_base 10: mod_base = OTHER; note = uracil
  modified_base 18: mod_base = OTHER; note = uracil
  source 1..21: mol_type = other DNA
gctggagcctgaagatttgca

SEQ ID NO: 863 - DNA, 22 bp, synthetic construct
  misc_feature 1..22: note = synthetic sequence
  modified_base 10: mod_base = OTHER; note = uracil
  modified_base 18: mod_base = OTHER; note = uracil
  source 1..22: mol_type = other DNA
cctagaccctgaagatgtcaca

SEQ ID NO: 864 - DNA, 22 bp, synthetic construct
  misc_feature 1..22: note = synthetic sequence
  modified_base 10: mod_base = OTHER; note = uracil
  modified_base 19: mod_base = OTHER; note = uracil
  source 1..22: mol_type = other DNA
catagaatctgaggatgctgca

SEQ ID NO: 865 - DNA, 22 bp, synthetic construct
  misc_feature 1..22: note = synthetic sequence
  modified_base 10: mod_base = OTHER; note = uracil
  modified_base 19: mod_base = OTHER; note = uracil
  source 1..22: mol_type = other DNA
cctgaagcctgaagattttgca

SEQ ID NO: 866 - DNA, 25 bp, synthetic construct
  misc_feature 1..25: note = synthetic sequence
  modified_base 4: mod_base = OTHER; note = uracil
  modified_base 14: mod_base = OTHER; note = uracil
  source 1..25: mol_type = other DNA
cagttttctgccttcccacacaggt

SEQ ID NO: 867 - DNA, 22 bp, synthetic construct
  misc_feature 1..22: note = synthetic sequence
  modified_base 11: mod_base = OTHER; note = uracil
  modified_base 20: mod_base = OTHER; note = uracil
  source 1..22: mol_type = other DNA
gggtggaggctgaggatattcg

SEQ ID NO: 868 - DNA, 22 bp, synthetic construct
  misc_feature 1..22: note = synthetic sequence
  modified_base 17: mod_base = OTHER; note = uracil
  modified_base 20: mod_base = OTHER; note = uracil
  source 1..22: mol_type = other DNA
ggacggagaccaaggatgttgg

SEQ ID NO: 869 - DNA, 22 bp, synthetic construct
  misc_feature 1..22: note = synthetic sequence
  modified_base 11: mod_base = OTHER; note = uracil
  modified_base 20: mod_base = OTHER; note = uracil
  source 1..22: mol_type = other DNA
gggtggaggctgaggatgttgg

SEQ ID NO: 870 - DNA, 22 bp, synthetic construct
  misc_feature 1..22: note = synthetic sequence
  modified_base 11: mod_base = OTHER; note = uracil
  modified_base 20: mod_base = OTHER; note = uracil
  source 1..22: mol_type = other DNA
ggacggagactaaggatgttgg

SEQ ID NO: 871 - DNA, 22 bp, synthetic construct
  misc_feature 1..22: note = synthetic sequence
  modified_base 11: mod_base = OTHER; note = uracil
  modified_base 20: mod_base = OTHER; note = uracil
  source 1..22: mol_type = other DNA
ggatggatgctgaggatgttgg

SEQ ID NO: 872 - DNA, 22 bp, synthetic construct
  misc_feature 1..22: note = synthetic sequence
  modified_base 11: mod_base = OTHER; note = uracil
  modified_base 20: mod_base = OTHER; note = uracil
  source 1..22: mol_type = other DNA
aagtggaggctgaggatgttgg

SEQ ID NO: 873 - DNA, 22 bp, synthetic construct
  misc_feature 1..22: note = synthetic sequence
  modified_base 11: mod_base = OTHER; note = uracil
  modified_base 20: mod_base = OTHER; note = uracil
  source 1..22: mol_type = other DNA
gagtggaggctgaggatgttgg

SEQ ID NO: 874 - DNA, 22 bp, synthetic construct
  misc_feature 1..22: note = synthetic sequence
  modified_base 11: mod_base = OTHER; note = uracil
  modified_base 20: mod_base = OTHER; note = uracil
  source 1..22: mol_type = other DNA
gggtggaggctgaggattttgg

SEQ ID NO: 875 - DNA, 22 bp, synthetic construct
  misc_feature 1..22: note = synthetic sequence
  modified_base 11: mod_base = OTHER; note = uracil
  modified_base 19: mod_base = OTHER; note = uracil
  source 1..22: mol_type = other DNA
gggtggaagctgaggatgtcgg

SEQ ID NO: 876 - DNA, 22 bp, synthetic construct
  misc_feature 1..22: note = synthetic sequence
  modified_base 11: mod_base = OTHER; note = uracil
  modified_base 20: mod_base = OTHER; note = uracil
  source 1..22: mol_type = other DNA
gggtagaggctgaggacgttgg

SEQ ID NO: 877 - DNA, 22 bp, synthetic construct
  misc_feature 1..22: note = synthetic sequence
  modified_base 11: mod_base = OTHER; note = uracil
  modified_base 20: mod_base = OTHER; note = uracil
  source 1..22: mol_type = other DNA
acatagaatctgaggatgctgc

SEQ ID NO: 878 - DNA, 22 bp, synthetic construct
  misc_feature 1..22: note = synthetic sequence
  modified_base 11: mod_base = OTHER; note = uracil
  modified_base 20: mod_base = OTHER; note = uracil
  source 1..22: mol_type = other DNA
ctgtggaagctaatgatactgc

SEQ ID NO: 879 - DNA, 22 bp, synthetic construct
  misc_feature 1..22: note = synthetic sequence
  modified_base 11: mod_base = OTHER; note = uracil
  modified_base 20: mod_base = OTHER; note = uracil
  source 1..22: mol_type = other DNA
acctgcagcctgaagattttgc

SEQ ID NO: 880 - DNA, 22 bp, synthetic construct
  misc_feature 1..22: note = synthetic sequence
  modified_base 11: mod_base = OTHER; note = uracil
  modified_base 20: mod_base = OTHER; note = uracil
  source 1..22: mol_type = other DNA
gcctgcagcctgaagattttgc

SEQ ID NO: 881 - DNA, 22 bp, synthetic construct
  misc_feature 1..22: note = synthetic sequence
  modified_base 11: mod_base = OTHER; note = uracil
  modified_base 20: mod_base = OTHER; note = uracil
  source 1..22: mol_type = other DNA
gtctgcaacctgaagattttgc

SEQ ID NO: 882 - DNA, 22 bp, synthetic construct
  misc_feature 1..22: note = synthetic sequence
  modified_base 11: mod_base = OTHER; note = uracil
  modified_base 20: mod_base = OTHER; note = uracil
  source 1..22: mol_type = other DNA
gcctgcaacctgaagatgttat

SEQ ID NO: 883 - DNA, 22 bp, synthetic construct
  misc_feature 1..22: note = synthetic sequence
  modified_base 11: mod_base = OTHER; note = uracil
  modified_base 19: mod_base = OTHER; note = uracil
  source 1..22: mol_type = other DNA
gcctgcaggctgaagatgtggc

SEQ ID NO: 884 - DNA, 22 bp, synthetic construct
  misc_feature 1..22: note = synthetic sequence
  modified_base 9: mod_base = OTHER; note = uracil
  modified_base 20: mod_base = OTHER; note = uracil
  source 1..22: mol_type = other DNA
tcctgcagtctgaagattttgc

SEQ ID NO: 885 - DNA, 22 bp, synthetic construct
  misc_feature 1..22: note = synthetic sequence
  modified_base 9: mod_base = OTHER; note = uracil
  modified_base 20: mod_base = OTHER; note = uracil
  source 1..22: mol_type = other DNA
tcctccagtctgaagttgctgc

SEQ ID NO: 886 - DNA, 22 bp, synthetic construct
  misc_feature 1..22: note = synthetic sequence
  modified_base 11: mod_base = OTHER; note = uracil
  modified_base 20: mod_base = OTHER; note = uracil
  source 1..22: mol_type = other DNA
gcctggaagctgaagatgctgc

SEQ ID NO: 887 - DNA, 22 bp, synthetic construct
  misc_feature 1..22: note = synthetic sequence
  modified_base 11: mod_base = OTHER; note = uracil
  modified_base 20: mod_base = OTHER; note = uracil
  source 1..22: mol_type = other DNA
gcctagagcctgaagattttgc

SEQ ID NO: 888 - DNA, 22 bp, synthetic construct
  misc_feature 1..22: note = synthetic sequence
  modified_base 11: mod_base = OTHER; note = uracil
  modified_base 20: mod_base = OTHER; note = uracil
  source 1..22: mol_type = other DNA
gcctgcagcctgatgattttgc

SEQ ID NO: 889 - DNA, 22 bp, synthetic construct
  misc_feature 1..22: note = synthetic sequence
  modified_base 11: mod_base = OTHER; note = uracil
  modified_base 20: mod_base = OTHER; note = uracil
  source 1..22: mol_type = other DNA
gactggagcctgaagattttgc

SEQ ID NO: 890 - DNA, 22 bp, synthetic construct
  misc_feature 1..22: note = synthetic sequence
  modified_base 11: mod_base = OTHER; note = uracil
  modified_base 20: mod_base = OTHER; note = uracil
  source 1..22: mol_type = other DNA
gcctgaagcctgaagattttgc

SEQ ID NO: 891 - DNA, 22 bp, synthetic construct
  misc_feature 1..22: note = synthetic sequence
  modified_base 11: mod_base = OTHER; note = uracil
  modified_base 20: mod_base = OTHER; note = uracil
  source 1..22: mol_type = other DNA
tcctgcagcctaaagatgttgc

SEQ ID NO: 892 - DNA, 22 bp, synthetic construct
  misc_feature 1..22: note = synthetic sequence
  modified_base 9: mod_base = OTHER; note = uracil
  modified_base 20: mod_base = OTHER; note = uracil
  source 1..22: mol_type = other DNA
gcctgcagtctgaagattttgc

SEQ ID NO: 893 - DNA, 22 bp, synthetic construct
  misc_feature 1..22: note = synthetic sequence
  modified_base 11: mod_base = OTHER; note = uracil
  modified_base 20: mod_base = OTHER; note = uracil
  source 1..22: mol_type = other DNA
ggctggagcatgaagattttgc

SEQ ID NO: 894 - DNA, 22 bp, synthetic construct
  misc_feature 1..22: note = synthetic sequence
  modified_base 11: mod_base = OTHER; note = uracil
  modified_base 19: mod_base = OTHER; note = uracil
  source 1..22: mol_type = other DNA
gcctagaccctgaagatgtcac

SEQ ID NO: 895 - DNA, 22 bp, synthetic construct
  misc_feature 1..22: note = synthetic sequence
  modified_base 11: mod_base = OTHER; note = uracil
  modified_base 20: mod_base = OTHER; note = uracil
  source 1..22: mol_type = other DNA
gcctgcagcctgaagatgttgc

SEQ ID NO: 896 - DNA, 22 bp, synthetic construct
  misc_feature 1..22: note = synthetic sequence
  modified_base 11: mod_base = OTHER; note = uracil
  modified_base 20: mod_base = OTHER; note = uracil
  source 1..22: mol_type = other DNA
gcctgcagcctgaagatattgc

SEQ ID NO: 897 - DNA, 21 bp, synthetic construct
  misc_feature 1..21: note = synthetic sequence
  modified_base 11: mod_base = OTHER; note = uracil
  modified_base 19: mod_base = OTHER; note = uracil
  source 1..21: mol_type = other DNA
ggctggagcctgaagatttgc

SEQ ID NO: 898 - DNA, 28 bp, synthetic construct
  misc_feature 1..28: note = synthetic sequence
  modified_base 8: mod_base = OTHER; note = uracil
  modified_base 18: mod_base = OTHER; note = uracil
  source 1..28: mol_type = other DNA
caatcagttttctgccttcccacacagg

SEQ ID NO: 899 - DNA, 22 bp, synthetic construct
  misc_feature 1..22: note = synthetic sequence
  modified_base 12: mod_base = OTHER; note = uracil
  modified_base 21: mod_base = OTHER; note = uracil
  source 1..22: mol_type = other DNA
cgggtggaggctgaggattttg

SEQ ID NO: 900 - DNA, 22 bp, synthetic construct
  misc_feature 1..22: note = synthetic sequence
  modified_base 12: mod_base = OTHER; note = uracil
  modified_base 21: mod_base = OTHER; note = uracil
  source 1..22: mol_type = other DNA
agggtggaggctgaggatgttg

SEQ ID NO: 901 - DNA, 22 bp, synthetic construct
  misc_feature 1..22: note = synthetic sequence
  modified_base 12: mod_base = OTHER; note = uracil
  modified_base 21: mod_base = OTHER; note = uracil
  source 1..22: mol_type = other DNA
agagtggaggctgaggatgttg

SEQ ID NO: 902 - DNA, 22 bp, synthetic construct
  misc_feature 1..22: note = synthetic sequence
  modified_base 12: mod_base = OTHER; note = uracil
  modified_base 21: mod_base = OTHER; note = uracil
  source 1..22: mol_type = other DNA
tgggtggaggctgaggatgttg

SEQ ID NO: 903 - DNA, 22 bp, synthetic construct
  misc_feature 1..22: note = synthetic sequence
  modified_base 9: mod_base = OTHER; note = uracil
  modified_base 21: mod_base = OTHER; note = uracil
  source 1..22: mol_type = other DNA
aggatggatgctgaggatgttg

SEQ ID NO: 904 - DNA, 22 bp, synthetic construct
  misc_feature 1..22: note = synthetic sequence
  modified_base 12: mod_base = OTHER; note = uracil
  modified_base 21: mod_base = OTHER; note = uracil
  source 1..22: mol_type = other DNA
cgggtggaggctgaggatgttg

SEQ ID NO: 905 - DNA, 22 bp, synthetic construct
  misc_feature 1..22: note = synthetic sequence
  modified_base 12: mod_base = OTHER; note = uracil
  modified_base 21: mod_base = OTHER; note = uracil
  source 1..22: mol_type = other DNA
aggacggagactaaggatgttg

SEQ ID NO: 906 - DNA, 22 bp, synthetic construct
  misc_feature 1..22: note = synthetic sequence
  modified_base 12: mod_base = OTHER; note = uracil
  modified_base 21: mod_base = OTHER; note = uracil
  source 1..22: mol_type = other DNA
aaagtggaggctgaggatgttg

SEQ ID NO: 907 - DNA, 22 bp, synthetic construct
  misc_feature 1..22: note = synthetic sequence
  modified_base 12: mod_base = OTHER; note = uracil
  modified_base 21: mod_base = OTHER; note = uracil
  source 1..22: mol_type = other DNA
agggtggaggctgaggatattc

SEQ ID NO: 908 - DNA, 22 bp, synthetic construct
  misc_feature 1..22: note = synthetic sequence
  modified_base 12: mod_base = OTHER; note = uracil
  modified_base 20: mod_base = OTHER; note = uracil
  source 1..22: mol_type = other DNA
agggtggaagctgaggatgtcg

SEQ ID NO: 909 - DNA, 22 bp, synthetic construct
  misc_feature 1..22: note = synthetic sequence
  modified_base 12: mod_base = OTHER; note = uracil
  modified_base 21: mod_base = OTHER; note = uracil
  source 1..22: mol_type = other DNA
agggtagaggctgaggacgttg

SEQ ID NO: 910 - DNA, 22 bp, synthetic construct
  misc_feature 1..22: note = synthetic sequence
  modified_base 18: mod_base = OTHER; note = uracil
  modified_base 21: mod_base = OTHER; note = uracil
  source 1..22: mol_type = other DNA
aggacggagaccaaggatgttg

SEQ ID NO: 911 - DNA, 23 bp, synthetic construct
  misc_feature 1..23: note = synthetic sequence
  source 1..23: mol_type = other DNA
gtttgatctccaccttggtccct

SEQ ID NO: 912 - DNA, 23 bp, synthetic construct
  misc_feature 1..23: note = synthetic sequence
  source 1..23: mol_type = other DNA
gtttgatttccaccttggtccct

SEQ ID NO: 913 - DNA, 23 bp, synthetic construct
  misc_feature 1..23: note = synthetic sequence
  source 1..23: mol_type = other DNA
gtttgatctccagcttggtcccc

SEQ ID NO: 914 - DNA, 23 bp, synthetic construct
  misc_feature 1..23: note = synthetic sequence
  source 1..23: mol_type = other DNA
gtttaatctccagtcgtgtccct

SEQ ID NO: 915 - DNA, 23 bp, synthetic construct
  misc_feature 1..23: note = synthetic sequence
  source 1..23: mol_type = other DNA
gtttgatatccactttggtccca

SEQ ID NO: 916 - DNA, 23 bp, synthetic construct
  misc_feature 1..23: note = synthetic sequence
  source 1..23: mol_type = other DNA
ttgatctccaccttggtccctcc

SEQ ID NO: 917 - DNA, 23 bp, synthetic construct
  misc_feature 1..23: note = synthetic sequence
  source 1..23: mol_type = other DNA
ttaatctccagtcgtgtcccttg

SEQ ID NO: 918 - DNA, 23 bp, synthetic construct
  misc_feature 1..23: note = synthetic sequence
  source 1..23: mol_type = other DNA
ttgatatccactttggtcccagg

SEQ ID NO: 919 - DNA, 23 bp, synthetic construct
  misc_feature 1..23: note = synthetic sequence
  source 1..23: mol_type = other DNA
ttgatttccaccttggtcccttg

SEQ ID NO: 920 - DNA, 23 bp, synthetic construct
  misc_feature 1..23: note = synthetic sequence
  source 1..23: mol_type = other DNA
ttgatctccagcttggtcccctg

SEQ ID NO: 921 - DNA, 19 bp, synthetic construct
  misc_feature 1..19: note = synthetic sequence
  source 1..19: mol_type = other DNA
tccagcttggtcccctggc

SEQ ID NO: 922 - DNA, 19 bp, synthetic construct
  misc_feature 1..19: note = synthetic sequence
  source 1..19: mol_type = other DNA
tccaccttggtccctccgc

SEQ ID NO: 923 - DNA, 19 bp, synthetic construct
  misc_feature 1..19: note = synthetic sequence
  source 1..19: mol_type = other DNA
tccactttggtcccagggc

SEQ ID NO: 924 - DNA, 19 bp, synthetic construct
  misc_feature 1..19: note = synthetic sequence
  source 1..19: mol_type = other DNA
tccaccttggtcccttggc

SEQ ID NO: 925 - DNA, 19 bp, synthetic construct
  misc_feature 1..19: note = synthetic sequence
  source 1..19: mol_type = other DNA
tccagtcgtgtcccttggc

SEQ ID NO: 926 - DNA, 17 bp, synthetic construct
  misc_feature 1..17: note = synthetic sequence
  source 1..17: mol_type = other DNA
cagtcgtgtcccttggc

SEQ ID NO: 927 - DNA, 17 bp, synthetic construct
  misc_feature 1..17: note = synthetic sequence
  source 1..17: mol_type = other DNA
cagcttggtcccctggc

SEQ ID NO: 928 - DNA, 17 bp, synthetic construct
  misc_feature 1..17: note = synthetic sequence
  source 1..17: mol_type = other DNA
caccttggtcccttggc

SEQ ID NO: 929 - DNA, 17 bp, synthetic construct
  misc_feature 1..17: note = synthetic sequence
  source 1..17: mol_type = other DNA
cactttggtcccagggc

SEQ ID NO: 930 - DNA, 17 bp, synthetic construct
  misc_feature 1..17: note = synthetic sequence
  source 1..17: mol_type = other DNA
caccttggtccctccgc

SEQ ID NO: 931 - DNA, 23 bp, synthetic construct
  misc_feature 1..23: note = synthetic sequence
  modified_base 9: mod_base = OTHER; note = uracil
  modified_base 19: mod_base = OTHER; note = uracil
  source 1..23: mol_type = other DNA
gtttgatctccaccttggtccct

SEQ ID NO: 932 - DNA, 23 bp, synthetic construct
  misc_feature 1..23: note = synthetic sequence
  modified_base 9: mod_base = OTHER; note = uracil
  modified_base 19: mod_base = OTHER; note = uracil
  source 1..23: mol_type = other DNA
gtttgatttccaccttggtccct

SEQ ID NO: 933 - DNA, 23 bp, synthetic construct
  misc_feature 1..23: note = synthetic sequence
  modified_base 9: mod_base = OTHER; note = uracil
  modified_base 19: mod_base = OTHER; note = uracil
  source 1..23: mol_type = other DNA
gtttgatctccagcttggtcccc

SEQ ID NO: 934 - DNA, 23 bp, synthetic construct
  misc_feature 1..23: note = synthetic sequence
  modified_base 9: mod_base = OTHER; note = uracil
  modified_base 19: mod_base = OTHER; note = uracil
  source 1..23: mol_type = other DNA
gtttaatctccagtcgtgtccct

SEQ ID NO: 935 - DNA, 23 bp, synthetic construct
  misc_feature 1..23: note = synthetic sequence
  modified_base 9: mod_base = OTHER; note = uracil
  modified_base 19: mod_base = OTHER; note = uracil
  source 1..23: mol_type = other DNA
gtttgatatccactttggtccca

SEQ ID NO: 936 - DNA, 23 bp, synthetic construct
  misc_feature 1..23: note = synthetic sequence
  modified_base 13: mod_base = OTHER; note = uracil
  modified_base 21: mod_base = OTHER; note = uracil
  source 1..23: mol_type = other DNA
ttgatctccaccttggtccctcc

SEQ ID NO: 937 - DNA, 23 bp, synthetic construct
  misc_feature 1..23: note = synthetic sequence
  modified_base 12: mod_base = OTHER; note = uracil
  modified_base 22: mod_base = OTHER; note = uracil
  source 1..23: mol_type = other DNA
ttaatctccagtcgtgtcccttg

SEQ ID NO: 938 - DNA, 23 bp, synthetic construct
  misc_feature 1..23: note = synthetic sequence
  modified_base 7: mod_base = OTHER; note = uracil
  modified_base 17: mod_base = OTHER; note = uracil
  source 1..23: mol_type = other DNA
ttgatatccactttggtcccagg

SEQ ID NO: 939 - DNA, 23 bp, synthetic construct
  misc_feature 1..23: note = synthetic sequence
  modified_base 13: mod_base = OTHER; note = uracil
  modified_base 22: mod_base = OTHER; note = uracil
  source 1..23: mol_type = other DNA
ttgatttccaccttggtcccttg

SEQ ID NO: 940 - DNA, 23 bp, synthetic construct
  misc_feature 1..23: note = synthetic sequence
  modified_base 13: mod_base = OTHER; note = uracil
  modified_base 22: mod_base = OTHER; note = uracil
  source 1..23: mol_type = other DNA
ttgatctccagcttggtcccctg

SEQ ID NO: 941 - DNA, 19 bp, synthetic construct
  misc_feature 1..19: note = synthetic sequence
  modified_base 8: mod_base = OTHER; note = uracil
  modified_base 16: mod_base = OTHER; note = uracil
  source 1..19: mol_type = other DNA
tccagcttggtcccctggc

SEQ ID NO: 942 - DNA, 19 bp, synthetic construct
  misc_feature 1..19: note = synthetic sequence
  modified_base 8: mod_base = OTHER; note = uracil
  modified_base 15: mod_base = OTHER; note = uracil
  source 1..19: mol_type = other DNA
tccaccttggtccctccgc

SEQ ID NO: 943 - DNA, 19 bp, synthetic construct
  misc_feature 1..19: note = synthetic sequence
  modified_base 6: mod_base = OTHER; note = uracil
  modified_base 11: mod_base = OTHER; note = uracil
  source 1..19: mol_type = other DNA
tccactttggtcccagggc

SEQ ID NO: 944 - DNA, 19 bp, synthetic construct
  misc_feature 1..19: note = synthetic sequence
  modified_base 8: mod_base = OTHER; note = uracil
  modified_base 16: mod_base = OTHER; note = uracil
  source 1..19: mol_type = other DNA
tccaccttggtcccttggc

SEQ ID NO: 945 - DNA, 19 bp, synthetic construct
  misc_feature 1..19: note = synthetic sequence
  modified_base 9: mod_base = OTHER; note = uracil
  modified_base 16: mod_base = OTHER; note = uracil
  source 1..19: mol_type = other DNA
tccagtcgtgtcccttggc

SEQ ID NO: 946 - DNA, 17 bp, synthetic construct
  misc_feature 1..17: note = synthetic sequence
  modified_base 7: mod_base = OTHER; note = uracil
  modified_base 14: mod_base = OTHER; note = uracil
  source 1..17: mol_type = other DNA
cagtcgtgtcccttggc

SEQ ID NO: 947 - DNA, 17 bp, synthetic construct
  misc_feature 1..17: note = synthetic sequence
  modified_base 6: mod_base = OTHER; note = uracil
  modified_base 14: mod_base = OTHER; note = uracil
  source 1..17: mol_type = other DNA
cagcttggtcccctggc

SEQ ID NO: 948 - DNA, 17 bp, synthetic construct
  misc_feature 1..17: note = synthetic sequence
  modified_base 6: mod_base = OTHER; note = uracil
  modified_base 14: mod_base = OTHER; note = uracil
  source 1..17: mol_type = other DNA
caccttggtcccttggc

SEQ ID NO: 949 - DNA, 17 bp, synthetic construct
  misc_feature 1..17: note = synthetic sequence
  modified_base 4: mod_base = OTHER; note = uracil
  modified_base 9: mod_base = OTHER; note = uracil
  source 1..17: mol_type = other DNA
cactttggtcccagggc

SEQ ID NO: 950 - DNA, 17 bp, synthetic construct
  misc_feature 1..17: note = synthetic sequence
  modified_base 6: mod_base = OTHER; note = uracil
  modified_base 13: mod_base = OTHER; note = uracil
  source 1..17: mol_type = other DNA
caccttggtccctccgc

SEQ ID NO: 951 - DNA, 20 bp, synthetic construct
  misc_feature 1..20: note = synthetic sequence
  source 1..20: mol_type = other DNA
ctttggtggccatgccaccg

SEQ ID NO: 952 - DNA, 18 bp, synthetic construct
  misc_feature 1..18: note = synthetic sequence
  source 1..18: mol_type = other DNA
cagccgccttgccgctag

SEQ ID NO: 953 - DNA, 18 bp, synthetic construct
  misc_feature 1..18: note = synthetic sequence
  source 1..18: mol_type = other DNA
catgccaccgcgctcttg

SEQ ID NO: 954 - DNA, 20 bp, synthetic construct
  misc_feature 1..20: note = synthetic sequence
  modified_base 7: mod_base = OTHER; note = uracil
  modified_base 13: mod_base = OTHER; note = uracil
  source 1..20: mol_type = other DNA
ctttggtggccatgccaccg

SEQ ID NO: 955 - DNA, 18 bp, synthetic construct
  misc_feature 1..18: note = synthetic sequence
  modified_base 9: mod_base = OTHER; note = uracil
  modified_base 16: mod_base = OTHER; note = uracil
  source 1..18: mol_type = other DNA
cagccgccttgccgctag

SEQ ID NO: 956 - DNA, 18 bp, synthetic construct
  misc_feature 1..18: note = synthetic sequence
  modified_base 3: mod_base = OTHER; note = uracil
  modified_base 17: mod_base = OTHER; note = uracil
  source 1..18: mol_type = other DNA
catgccaccgcgctcttg

SEQ ID NO: 957 - DNA, 19 bp, synthetic construct
  misc_feature 1..19: note = synthetic sequence
  source 1..19: mol_type = other DNA
agccgcggtctttctcgat

SEQ ID NO: 958 - DNA, 21 bp, synthetic construct
  misc_feature 1..21: note = synthetic sequence
  source 1..21: mol_type = other DNA
cgcggtctttctcgattgagt

SEQ ID NO: 959 - DNA, 19 bp, synthetic construct
  misc_feature 1..19: note = synthetic sequence
  source 1..19: mol_type = other DNA
ccctgtgtctgcccgattg

SEQ ID NO: 960 - DNA, 19 bp, synthetic construct
  misc_feature 1..19: note = synthetic sequence
  modified_base 9: mod_base = OTHER; note = uracil
  modified_base 15: mod_base = OTHER; note = uracil
  source 1..19: mol_type = other DNA
agccgcggtctttctcgat

SEQ ID NO: 961 - DNA, 21 bp, synthetic construct
  misc_feature 1..21: note = synthetic sequence
  modified_base 8: mod_base = OTHER; note = uracil
  modified_base 17: mod_base = OTHER; note = uracil
  source 1..21: mol_type = other DNA
cgcggtctttctcgattgagt

SEQ ID NO: 962 - DNA, 19 bp, synthetic construct
  misc_feature 1..19: note = synthetic sequence
  modified_base 8: mod_base = OTHER; note = uracil
  modified_base 18: mod_base = OTHER; note = uracil
  source 1..19: mol_type = other DNA
ccctgtgtctgcccgattg

SEQ ID NO: 963 - DNA, 25 bp, synthetic construct
  misc_feature 1..25: note = synthetic sequence
  source 1..25: mol_type = other DNA
ctgtaaataagcattatcctgggct

SEQ ID NO: 964 - DNA, 25 bp, synthetic construct
  misc_feature 1..25: note = synthetic sequence
  source 1..25: mol_type = other DNA
gtaaataagcattatcctgggctga

SEQ ID NO: 965 - DNA, 26 bp, synthetic construct
  misc_feature 1..26: note = synthetic sequence
  source 1..26: mol_type = other DNA
ctgctgtaaataagcattatcctggg

SEQ ID NO: 966 - DNA, 25 bp, synthetic construct
  misc_feature 1..25: note = synthetic sequence
  modified_base 8: mod_base = OTHER; note = uracil
  modified_base 20: mod_base = OTHER; note = uracil
  source 1..25: mol_type = other DNA
ctgtaaataagcattatcctgggct

SEQ ID NO: 967 - DNA, 25 bp, synthetic construct
  misc_feature 1..25: note = synthetic sequence
  modified_base 13: mod_base = OTHER; note = uracil
  modified_base 23: mod_base = OTHER; note = uracil
  source 1..25: mol_type = other DNA
gtaaataagcattatcctgggctga

SEQ ID NO: 968 - DNA, 26 bp, synthetic construct
  misc_feature 1..26: note = synthetic sequence
  modified_base 11: mod_base = OTHER; note = uracil
  modified_base 23: mod_base = OTHER; note = uracil
  source 1..26: mol_type = other DNA
ctgctgtaaataagcattatcctggg

SEQ ID NO: 969 - DNA, 22 bp, synthetic construct
  misc_feature 1..22: note = synthetic sequence
  source 1..22: mol_type = other DNA
cagactcatgaggagtcgccct

SEQ ID NO: 970 - DNA, 20 bp, synthetic construct
  misc_feature 1..20: note = synthetic sequence
  source 1..20: mol_type = other DNA
actcatgaggagtcgccctg

SEQ ID NO: 971 - DNA, 24 bp, synthetic construct
  misc_feature 1..24: note = synthetic sequence
  source 1..24: mol_type = other DNA
cagctgcagactcatgaggagtcg

SEQ ID NO: 972 - DNA, 22 bp, synthetic construct
  misc_feature 1..22: note = synthetic sequence
  modified_base 9: mod_base = OTHER; note = uracil
  modified_base 16: mod_base = OTHER; note = uracil
  source 1..22: mol_type = other DNA
cagactcatgaggagtcgccct

SEQ ID NO: 973 - DNA, 20 bp, synthetic construct
  misc_feature 1..20: note = synthetic sequence
  modified_base 13: mod_base = OTHER; note = uracil
  modified_base 19: mod_base = OTHER; note = uracil
  source 1..20: mol_type = other DNA
actcatgaggagtcgccctg

SEQ ID NO: 974 - DNA, 24 bp, synthetic construct
  misc_feature 1..24: note = synthetic sequence
  modified_base 12: mod_base = OTHER; note = uracil
  modified_base 22: mod_base = OTHER; note = uracil
  source 1..24: mol_type = other DNA
cagctgcagactcatgaggagtcg

SEQ ID NO: 975 - DNA, 18 bp, synthetic construct
  misc_feature 1..18: note = synthetic sequence
  source 1..18: mol_type = other DNA
gaggagacggtgaccgtg

SEQ ID NO: 976 - DNA, 19 bp, synthetic construct
  misc_feature 1..19: note = synthetic sequence
  source 1..19: mol_type = other DNA
gagacagtgaccagggtgc

SEQ ID NO: 977 - DNA, 19 bp, synthetic construct
  misc_feature 1..19: note = synthetic sequence
  source 1..19: mol_type = other DNA
gagacggtgaccattgtcc

SEQ ID NO: 978 - DNA, 19 bp, synthetic construct
  misc_feature 1..19: note = synthetic sequence
  source 1..19: mol_type = other DNA
tgaggagacggtgaccagg

SEQ ID NO: 979 - DNA, 22 bp, synthetic construct
  misc_feature 1..22: note = synthetic sequence
  source 1..22: mol_type = other DNA
cttacctgaggagacggtgacc

SEQ ID NO: 980 - DNA, 21 bp, synthetic construct
  misc_feature 1..21: note = synthetic sequence
  source 1..21: mol_type = other DNA
gactcacctgaggagacggtg

SEQ ID NO: 981 - DNA, 21 bp, synthetic construct
  misc_feature 1..21: note = synthetic sequence
  source 1..21: mol_type = other DNA
gactcacctgaggagacagtg

SEQ ID NO: 982 - DNA, 21 bp, synthetic construct
  misc_feature 1..21: note = synthetic sequence
  source 1..21: mol_type = other DNA
ttcttacctgaggagacggtg

SEQ ID NO: 983 - DNA, 18 bp, synthetic construct
  misc_feature 1..18: note = synthetic sequence
  modified_base 11: mod_base = OTHER; note = uracil
  modified_base 17: mod_base = OTHER; note = uracil
  source 1..18: mol_type = other DNA
gaggagacggtgaccgtg

SEQ ID NO: 984 - DNA, 19 bp, synthetic construct
  misc_feature 1..19: note = synthetic sequence
  modified_base 8: mod_base = OTHER; note = uracil
  modified_base 17: mod_base = OTHER; note = uracil
  source 1..19: mol_type = other DNA
gagacagtgaccagggtgc

SEQ ID NO: 985 - DNA, 19 bp, synthetic construct
  misc_feature 1..19: note = synthetic sequence
  modified_base 8: mod_base = OTHER; note = uracil
  modified_base 17: mod_base = OTHER; note = uracil
  source 1..19: mol_type = other DNA
gagacggtgaccattgtcc

SEQ ID NO: 986 - DNA, 19 bp, synthetic construct
  misc_feature 1..19: note = synthetic sequence
  modified_base 12: mod_base = OTHER; note = uracil
  source 1..19: mol_type = other DNA
tgaggagacggtgaccagg

SEQ ID NO: 987 - DNA, 22 bp, synthetic construct
  misc_feature 1..22: note = synthetic sequence
  modified_base 7: mod_base = OTHER; note = uracil
  modified_base 18: mod_base = OTHER; note = uracil
  source 1..22: mol_type = other DNA
cttacctgaggagacggtgacc

SEQ ID NO: 988 - DNA, 21 bp, synthetic construct
  misc_feature 1..21: note = synthetic sequence
  modified_base 9: mod_base = OTHER; note = uracil
  modified_base 20: mod_base = OTHER; note = uracil
  source 1..21: mol_type = other DNA
gactcacctgaggagacggtg

SEQ ID NO: 989 - DNA, 21 bp, synthetic construct
  misc_feature 1..21: note = synthetic sequence
  modified_base 9: mod_base = OTHER; note = uracil
  modified_base 20: mod_base = OTHER; note = uracil
  source 1..21: mol_type = other DNA
gactcacctgaggagacagtg

SEQ ID NO: 990 - DNA, 21 bp, synthetic construct
  misc_feature 1..21: note = synthetic sequence
  modified_base 9: mod_base = OTHER; note = uracil
  modified_base 20: mod_base = OTHER; note = uracil
  source 1..21: mol_type = other DNA
ttcttacctgaggagacggtg

SEQ ID NO: 991 - DNA, 19 bp, synthetic construct
  misc_feature 1..19: note = synthetic sequence
  source 1..19: mol_type = other DNA
gtgggctggatccgtcagc

SEQ ID NO: 992 - DNA, 19 bp, synthetic construct
  misc_feature 1..19: note = synthetic sequence
  source 1..19: mol_type = other DNA
gtgagctggatccgtcagc

SEQ ID NO: 993 - DNA, 19 bp, synthetic construct
  misc_feature 1..19: note = synthetic sequence
  source 1..19: mol_type = other DNA
gcgagctggatccgtcagc

SEQ ID NO: 994 - DNA, 19 bp, synthetic construct
  misc_feature 1..19: note = synthetic sequence
  source 1..19: mol_type = other DNA
gtgagctgggtccgtcagc

SEQ ID NO: 995 - DNA, 17 bp, synthetic construct
  misc_feature 1..17: note = synthetic sequence
  source 1..17: mol_type = other DNA
gcactgggtccgtcaag

SEQ ID NO: 996 - DNA, 17 bp, synthetic construct
  misc_feature 1..17: note = synthetic sequence
  source 1..17: mol_type = other DNA
gtactgggtccgccagg

SEQ ID NO: 997 - DNA, 17 bp, synthetic construct
  misc_feature 1..17: note = synthetic sequence
  source 1..17: mol_type = other DNA
gcactgggtccgccagg

SEQ ID NO: 998 - DNA, 17 bp, synthetic construct
  misc_feature 1..17: note = synthetic sequence
  source 1..17: mol_type = other DNA
ggactgggtccgccagg

SEQ ID NO: 999 - DNA, 17 bp, synthetic construct
  misc_feature 1..17: note = synthetic sequence
  source 1..17: mol_type = other DNA
gaactgggtccgccagg

SEQ ID NO: 1000 - DNA, 17 bp, synthetic construct
  misc_feature 1..17: note = synthetic sequence
  source 1..17: mol_type = other DNA
gagctggttccgccagg

SEQ ID NO: 1001 - DNA, 17 bp, synthetic construct
  misc_feature 1..17: note = synthetic sequence
  source 1..17: mol_type = other DNA
gagctgggtccgccagg

SEQ ID NO: 1002 - DNA, 17 bp, synthetic construct
  misc_feature 1..17: note = synthetic sequence
  source 1..17: mol_type = other DNA
gcactgggtccggcaag

SEQ ID NO: 1003 - DNA, 17 bp, synthetic construct
  misc_feature 1..17: note = synthetic sequence
  source 1..17: mol_type = other DNA
gcactgggtccgccaag

SEQ ID NO: 1004 - DNA, 17 bp, synthetic construct
  misc_feature 1..17: note = synthetic sequence
  source 1..17: mol_type = other DNA
gagctggatccgccagg

SEQ ID NO: 1005 - DNA, 17 bp, synthetic construct
  misc_feature 1..17: note = synthetic sequence
  source 1..17: mol_type = other DNA
gagctgggtccgccagc

SEQ ID NO: 1006 - DNA, 17 bp, synthetic construct
  misc_feature 1..17: note = synthetic sequence
  source 1..17: mol_type = other DNA
gagctgggtccgccaag

SEQ ID NO: 1007 - DNA, 19 bp, synthetic construct
  misc_feature 1..19: note = synthetic sequence
  source 1..19: mol_type = other DNA
ctgcactgggtgcgacagg

SEQ ID NO: 1008 - DNA, 19 bp, synthetic construct
  misc_feature 1..19: note = synthetic sequence
  source 1..19: mol_type = other DNA
atcaactgggtgcgacagg

SEQ ID NO: 1009 - DNA, 19 bp, synthetic construct
  misc_feature 1..19: note = synthetic sequence
  source 1..19: mol_type = other DNA
atgaattgggtgcgacagg

SEQ ID NO: 1010 - DNA, 19 bp, synthetic construct
  misc_feature 1..19: note = synthetic sequence
  source 1..19: mol_type = other DNA
atcagctgggtgcgacagg

SEQ ID NO: 1011 - DNA, 19 bp, synthetic construct
  misc_feature 1..19: note = synthetic sequence
  source 1..19: mol_type = other DNA
atgcactgggtgcgacagg

SEQ ID NO: 1012 - DNA, 19 bp, synthetic construct
  misc_feature 1..19: note = synthetic sequence
  source 1..19: mol_type = other DNA
atgcattgggtgcgccagg

SEQ ID NO: 1013 - DNA, 19 bp, synthetic construct
  misc_feature 1..19: note = synthetic sequence
  source 1..19: mol_type = other DNA
atgcagtgggtgcgacagg

SEQ ID NO: 1014 - DNA, 19 bp, synthetic construct
  misc_feature 1..19: note = synthetic sequence
  source 1..19: mol_type = other DNA
atgcactgggtgcaacagg

SEQ ID NO: 1015 - DNA, 19 bp, synthetic construct
  misc_feature 1..19: note = synthetic sequence
  source 1..19: mol_type = other DNA
gtgcagtgggtgcgacagg

SEQ ID NO: 1016 - DNA, 17 bp, synthetic construct
  misc_feature 1..17: note = synthetic sequence
  source 1..17: mol_type = other DNA
gagctggatccggcagc

SEQ ID NO: 1017 - DNA, 17 bp, synthetic construct
  misc_feature 1..17: note = synthetic sequence
  source 1..17: mol_type = other DNA
gagctggatccgccagc

SEQ ID NO: 1018 - DNA, 17 bp, synthetic construct
  misc_feature 1..17: note = synthetic sequence
  source 1..17: mol_type = other DNA
gagttgggtccgccagc

SEQ ID NO: 1019 - DNA, 17 bp, synthetic construct
  misc_feature 1..17: note = synthetic sequence
  source 1..17: mol_type = other DNA
gaactggatcaggcagt

SEQ ID NO: 1020 - DNA, 17 bp, synthetic construct
  misc_feature 1..17: note = synthetic sequence
  source 1..17: mol_type = other DNA
gggctggatccggcagc

SEQ ID NO: 1021 - DNA, 17 bp, synthetic construct
  misc_feature 1..17: note = synthetic sequence
  source 1..17: mol_type = other DNA
gggctggatccgccagc

SEQ ID NO: 1022 - DNA, 17 bp, synthetic construct
  misc_feature 1..17: note = synthetic sequence
  source 1..17: mol_type = other DNA
gagctggatccggcagt

SEQ ID NO: 1023 - DNA, 17 bp, synthetic construct
  misc_feature 1..17: note = synthetic sequence
  source 1..17: mol_type = other DNA
gtgctggatccgccagc

SEQ ID NO: 1024 - DNA, 17 bp, synthetic construct
  misc_feature 1..17: note = synthetic sequence
  source 1..17: mol_type = other DNA
gagttggatccgccagc

SEQ ID NO: 1025 - DNA, 19 bp, synthetic construct
  misc_feature 1..19: note = synthetic sequence
  source 1..19: mol_type = other DNA
accggctgggtgcgccaga

SEQ ID NO: 1026 - DNA, 19 bp, synthetic construct
  misc_feature 1..19: note = synthetic sequence
  source 1..19: mol_type = other DNA
atcagctgggtgcgccaga

SEQ ID NO: 1027 - DNA, 19 bp, synthetic construct
  misc_feature 1..19: note = synthetic sequence
  source 1..19: mol_type = other DNA
atcggctgggtgcaccaga

SEQ ID NO: 1028 - DNA, 19 bp, synthetic construct
  misc_feature 1..19: note = synthetic sequence
  source 1..19: mol_type = other DNA
atcggctgggtgcgccaga

SEQ ID NO: 1029 - DNA, 19 bp, synthetic construct
  misc_feature 1..19: note = synthetic sequence
  modified_base 7: mod_base = OTHER; note = uracil
  modified_base 15: mod_base = OTHER; note = uracil
  source 1..19: mol_type = other DNA
gtgggctggatccgtcagc

SEQ ID NO: 1030 - DNA, 19 bp, synthetic construct
  misc_feature 1..19: note = synthetic sequence
  modified_base 7: mod_base = OTHER; note = uracil
  modified_base 15: mod_base = OTHER; note = uracil
  source 1..19: mol_type = other DNA
gtgagctggatccgtcagc

SEQ ID NO: 1031 - DNA, 19 bp, synthetic construct
  misc_feature 1..19: note = synthetic sequence
  modified_base 7: mod_base = OTHER; note = uracil
  modified_base 15: mod_base = OTHER; note = uracil
  source 1..19: mol_type = other DNA
gcgagctggatccgtcagc

SEQ ID NO: 1032 - DNA, 19 bp, synthetic construct
  misc_feature 1..19: note = synthetic sequence
  modified_base 7: mod_base = OTHER; note = uracil
  modified_base 15: mod_base = OTHER; note = uracil
  source 1..19: mol_type = other DNA
gtgagctgggtccgtcagc

SEQ ID NO: 1033 - DNA, 17 bp, synthetic construct
  misc_feature 1..17: note = synthetic sequence
  modified_base 5: mod_base = OTHER; note = uracil
  modified_base 13: mod_base = OTHER; note = uracil
  source 1..17: mol_type = other DNA
gcactgggtccgtcaag

SEQ ID NO: 1034 - DNA, 17 bp, synthetic construct
  misc_feature 1..17: note = synthetic sequence
  modified_base 2: mod_base = OTHER; note = uracil
  modified_base 9: mod_base = OTHER; note = uracil
  source 1..17: mol_type = other DNA
gtactgggtccgccagg

SEQ ID NO: 1035 - DNA, 17 bp, synthetic construct
  misc_feature 1..17: note = synthetic sequence
  modified_base 5: mod_base = OTHER; note = uracil
  modified_base 9: mod_base = OTHER; note = uracil
  source 1..17: mol_type = other DNA
gcactgggtccgccagg

SEQ ID NO: 1036 - DNA, 17 bp, synthetic construct
  misc_feature 1..17: note = synthetic sequence
  modified_base 5: mod_base = OTHER; note = uracil
  modified_base 9: mod_base = OTHER; note = uracil
  source 1..17: mol_type = other DNA
ggactgggtccgccagg

SEQ ID NO: 1037 - DNA, 17 bp, synthetic construct
  misc_feature 1..17: note = synthetic sequence
  modified_base 5: mod_base = OTHER; note = uracil
  modified_base 9: mod_base = OTHER; note = uracil
  source 1..17: mol_type = other DNA
gaactgggtccgccagg

SEQ ID NO: 1038 - DNA, 17 bp, synthetic construct
  misc_feature 1..17: note = synthetic sequence
  modified_base 5: mod_base = OTHER; note = uracil
  modified_base 9: mod_base = OTHER; note = uracil
  source 1..17: mol_type = other DNA
gagctggttccgccagg

SEQ ID NO: 1039 - DNA, 17 bp, synthetic construct
  misc_feature 1..17: note = synthetic sequence
  modified_base 5: mod_base = OTHER; note = uracil
  modified_base 9: mod_base = OTHER; note = uracil
  source 1..17: mol_type = other DNA
gagctgggtccgccagg

SEQ ID NO: 1040 - DNA, 17 bp, synthetic construct
  misc_feature 1..17: note = synthetic sequence
  modified_base 5: mod_base = OTHER; note = uracil
  modified_base 9: mod_base = OTHER; note = uracil
  source 1..17: mol_type = other DNA
gcactgggtccggcaag

SEQ ID NO: 1041 - DNA, 17 bp, synthetic construct
  misc_feature 1..17: note = synthetic sequence
  modified_base 5: mod_base = OTHER; note = uracil
  modified_base 9: mod_base = OTHER; note = uracil
  source 1..17: mol_type = other DNA
gcactgggtccgccaag

SEQ ID NO: 1042 - DNA, 17 bp, synthetic construct
  misc_feature 1..17: note = synthetic sequence
  modified_base 5: mod_base = OTHER; note = uracil
  modified_base 9: mod_base = OTHER; note = uracil
  source 1..17: mol_type = other DNA
gagctggatccgccagg

SEQ ID NO: 1043 - DNA, 17 bp, synthetic construct
  misc_feature 1..17: note = synthetic sequence
  modified_base 5: mod_base = OTHER; note = uracil
  modified_base 9: mod_base = OTHER; note = uracil
  source 1..17: mol_type = other DNA
gagctgggtccgccagc

SEQ ID NO: 1044 - DNA, 17 bp, synthetic construct
  misc_feature 1..17: note = synthetic sequence
  modified_base 5: mod_base = OTHER; note = uracil
  modified_base 9: mod_base = OTHER; note = uracil
  source 1..17: mol_type = other DNA
gagctgggtccgccaag

SEQ ID NO: 1045 - DNA, 19 bp, synthetic construct
  misc_feature 1..19: note = synthetic sequence
  modified_base 2: mod_base = OTHER; note = uracil
  modified_base 11: mod_base = OTHER; note = uracil
  source 1..19: mol_type = other DNA
ctgcactgggtgcgacagg

SEQ ID NO: 1046 - DNA, 19 bp, synthetic construct
  misc_feature 1..19: note = synthetic sequence
  modified_base 2: mod_base = OTHER; note = uracil
  modified_base 11: mod_base = OTHER; note = uracil
  source 1..19: mol_type = other DNA
atcaactgggtgcgacagg

SEQ ID NO: 1047 - DNA, 19 bp, synthetic construct
  misc_feature 1..19: note = synthetic sequence
  modified_base 2: mod_base = OTHER; note = uracil
  modified_base 11: mod_base = OTHER; note = uracil
  source 1..19: mol_type = other DNA
atgaattgggtgcgacagg

SEQ ID NO: 1048 - DNA, 19 bp, synthetic construct
  misc_feature 1..19: note = synthetic sequence
  modified_base 2: mod_base = OTHER; note = uracil
  modified_base 11: mod_base = OTHER; note = uracil
  source 1..19: mol_type = other DNA
atcagctgggtgcgacagg

SEQ ID NO: 1049 - DNA, 19 bp, synthetic construct
  misc_feature 1..19: note = synthetic sequence
  modified_base 2: mod_base = OTHER; note = uracil
  modified_base 11: mod_base = OTHER; note = uracil
  source 1..19: mol_type = other DNA
atgcactgggtgcgacagg

SEQ ID NO: 1050 - DNA, 19 bp, synthetic construct
  misc_feature 1..19: note = synthetic sequence
  modified_base 2: mod_base = OTHER; note = uracil
  modified_base 11: mod_base = OTHER; note = uracil
  source 1..19: mol_type = other DNA
atgcattgggtgcgccagg

SEQ ID NO: 1051 - DNA, 19 bp, synthetic construct
  misc_feature 1..19: note = synthetic sequence
  modified_base 2: mod_base = OTHER; note = uracil
  modified_base 11: mod_base = OTHER; note = uracil
  source 1..19: mol_type = other DNA
atgcagtgggtgcgacagg

SEQ ID NO: 1052 - DNA, 19 bp, synthetic construct
  misc_feature 1..19: note = synthetic sequence
  modified_base 7: mod_base = OTHER; note = uracil
  modified_base 11: mod_base = OTHER; note = uracil
  source 1..19: mol_type = other DNA
atgcactgggtgcaacagg

SEQ ID NO: 1053 - DNA, 19 bp, synthetic construct
  misc_feature 1..19: note = synthetic sequence
  modified_base 2: mod_base = OTHER; note = uracil
  modified_base 11: mod_base = OTHER; note = uracil
  source 1..19: mol_type = other DNA
gtgcagtgggtgcgacagg

SEQ ID NO: 1054 - DNA, 17 bp, synthetic construct
  misc_feature 1..17: note = synthetic sequence
  modified_base 5: mod_base = OTHER; note = uracil
  modified_base 9: mod_base = OTHER; note = uracil
  source 1..17: mol_type = other DNA
gagctggatccggcagc

SEQ ID NO: 1055 - DNA, 17 bp, synthetic construct
  misc_feature 1..17: note = synthetic sequence
  modified_base 5: mod_base = OTHER; note = uracil
  modified_base 9: mod_base = OTHER; note = uracil
  source 1..17: mol_type = other DNA
gagctggatccgccagc

SEQ ID NO: 1056 - DNA, 17 bp, synthetic construct
  misc_feature 1..17: note = synthetic sequence
  modified_base 4: mod_base = OTHER; note = uracil
  modified_base 9: mod_base = OTHER; note = uracil
  source 1..17: mol_type = other DNA
gagttgggtccgccagc

SEQ ID NO: 1057 - DNA, 17 bp, synthetic construct
  misc_feature 1..17: note = synthetic sequence
  modified_base 5: mod_base = OTHER; note = uracil
  modified_base 9: mod_base = OTHER; note = uracil
  source 1..17: mol_type = other DNA
gaactggatcaggcagt

SEQ ID NO: 1058 - DNA, 17 bp, synthetic construct
  misc_feature 1..17: note = synthetic sequence
  modified_base 5: mod_base = OTHER; note = uracil
  modified_base 9: mod_base = OTHER; note = uracil
  source 1..17: mol_type = other DNA
gggctggatccggcagc

SEQ ID NO: 1059 - DNA, 17 bp, synthetic construct
  misc_feature 1..17: note = synthetic sequence
  modified_base 5: mod_base = OTHER; note = uracil
  modified_base 9: mod_base = OTHER; note = uracil
  source 1..17: mol_type = other DNA
gggctggatccgccagc

SEQ ID NO: 1060 - DNA, 17 bp, synthetic construct
  misc_feature 1..17: note = synthetic sequence
  modified_base 5: mod_base = OTHER; note = uracil
  modified_base 9: mod_base = OTHER; note = uracil
  source 1..17: mol_type = other DNA
gagctggatccggcagt

SEQ ID NO: 1061 - DNA, 17 bp, synthetic construct
  misc_feature 1..17: note = synthetic sequence
  modified_base 2: mod_base = OTHER; note = uracil
  modified_base 9: mod_base = OTHER; note = uracil
  source 1..17: mol_type = other DNA
gtgctggatccgccagc

SEQ ID NO: 1062 - DNA, 17 bp, synthetic construct
  misc_feature 1..17: note = synthetic sequence
  modified_base 4: mod_base = OTHER; note = uracil
  modified_base 9: mod_base = OTHER; note = uracil
  source 1..17: mol_type = other DNA
gagttggatccgccagc

SEQ ID NO: 1063 - DNA, 19 bp, synthetic construct
  misc_feature 1..19: note = synthetic sequence
  modified_base 7: mod_base = OTHER; note = uracil
  modified_base 11: mod_base = OTHER; note = uracil
  source 1..19: mol_type = other DNA
accggctgggtgcgccaga

SEQ ID NO: 1064 - DNA, 19 bp, synthetic construct
  misc_feature 1..19: note = synthetic sequence
  modified_base 2: mod_base = OTHER; note = uracil
  modified_base 11: mod_base = OTHER; note = uracil
  source 1..19: mol_type = other DNA
atcagctgggtgcgccaga

SEQ ID NO: 1065 - DNA, 19 bp, synthetic construct
  misc_feature 1..19: note = synthetic sequence
  modified_base 7: mod_base = OTHER; note = uracil
  modified_base 11: mod_base = OTHER; note = uracil
  source 1..19: mol_type = other DNA
atcggctgggtgcaccaga

SEQ ID NO: 1066 - DNA, 19 bp, synthetic construct
  misc_feature 1..19: note = synthetic sequence
  modified_base 7: mod_base = OTHER; note = uracil
  modified_base 11: mod_base = OTHER; note = uracil
  source 1..19: mol_type = other DNA
atcggctgggtgcgccaga

SEQ ID NO: 1067 - DNA, 23 bp, synthetic construct
  misc_feature 1..23: note = synthetic sequence
  modified_base 12: mod_base = OTHER; note = uracil
  modified_base 16: mod_base = OTHER; note = uracil
  source 1..23: mol_type = other DNA
tctacagcacatccctgaagacc

SEQ ID NO: 1068 - DNA, 23 bp, synthetic construct
  misc_feature 1..23: note = synthetic sequence
  modified_base 12: mod_base = OTHER; note = uracil
  modified_base 16: mod_base = OTHER; note = uracil
  source 1..23: mol_type = other DNA
tctacagcacatctctgaagacc

SEQ ID NO: 1069 - DNA, 23 bp, synthetic construct
  misc_feature 1..23: note = synthetic sequence
  modified_base 12: mod_base = OTHER; note = uracil
  modified_base 16: mod_base = OTHER; note = uracil
  source 1..23: mol_type = other DNA
actacagcacatctctgaacacc

SEQ ID NO: 1070 - DNA, 23 bp, synthetic construct
  misc_feature 1..23: note = synthetic sequence
  modified_base 12: mod_base = OTHER; note = uracil
  modified_base 16: mod_base = OTHER; note = uracil
  source 1..23: mol_type = other DNA
gctacggcccatctctgaagagc

SEQ ID NO: 1071 - DNA, 23 bp, synthetic construct
  misc_feature 1..23: note = synthetic sequence
  modified_base 12: mod_base = OTHER; note = uracil
  modified_base 16: mod_base = OTHER; note = uracil
  source 1..23: mol_type = other DNA
actacagcacatctctgaagacc

SEQ ID NO: 1072 - DNA, 23 bp, synthetic construct
  misc_feature 1..23: note = synthetic sequence
  modified_base 12: mod_base = OTHER; note = uracil
  modified_base 16: mod_base = OTHER; note = uracil
  source 1..23: mol_type = other DNA
gctacagcccatctctgaagagc

SEQ ID NO: 1073 - DNA, 23 bp, synthetic construct
  misc_feature 1..23: note = synthetic sequence
  modified_base 12: mod_base = OTHER; note = uracil
  modified_base 16: mod_base = OTHER; note = uracil
  source 1..23: mol_type = other DNA
cctacagcacatctctgaagagc

SEQ ID NO: 1074 - DNA, 21 bp, synthetic construct
  misc_feature 1..21: note = synthetic sequence
  modified_base 10: mod_base = OTHER; note = uracil
  modified_base 14: mod_base = OTHER; note = uracil
  source 1..21: mol_type = other DNA
tatccaggctccgtgaagggg

SEQ ID NO: 1075 - DNA, 21 bp, synthetic construct
  misc_feature 1..21: note = synthetic sequence
  modified_base 10: mod_base = OTHER; note = uracil
  modified_base 14: mod_base = OTHER; note = uracil
  source 1..21: mol_type = other DNA
tacacagactccgtgaagggc

SEQ ID NO: 1076 - DNA, 21 bp, synthetic construct
  misc_feature 1..21: note = synthetic sequence
  modified_base 10: mod_base = OTHER; note = uracil
  modified_base 14: mod_base = OTHER; note = uracil
  source 1..21: mol_type = other DNA
tatgcagactctgtgaagggc

SEQ ID NO: 1077 - DNA, 21 bp, synthetic construct
  misc_feature 1..21: note = synthetic sequence
  modified_base 10: mod_base = OTHER; note = uracil
  modified_base 14: mod_base = OTHER; note = uracil
  source 1..21: mol_type = other DNA
tacggagactccgtgaagggc

SEQ ID NO: 1078 - DNA, 21 bp, synthetic construct
  misc_feature 1..21: note = synthetic sequence
  modified_base 5: mod_base = OTHER; note = uracil
  modified_base 14: mod_base = OTHER; note = uracil
  source 1..21: mol_type = other DNA
tatgtggactctgtgaagggc

SEQ ID NO: 1079 - DNA, 21 bp, synthetic construct
  misc_feature 1..21: note = synthetic sequence
  modified_base 10: mod_base = OTHER; note = uracil
  modified_base 14: mod_base = OTHER; note = uracil
  source 1..21: mol_type = other DNA
tatgcagactccgtgaagggc

SEQ ID NO: 1080 - DNA, 21 bp, synthetic construct
  misc_feature 1..21: note = synthetic sequence
  modified_base 10: mod_base = OTHER; note = uracil
  modified_base 14: mod_base = OTHER; note = uracil
  source 1..21: mol_type = other DNA
tacacagactctgtgaagggc

SEQ ID NO: 1081 - DNA, 21 bp, synthetic construct
  misc_feature 1..21: note = synthetic sequence
  modified_base 10: mod_base = OTHER; note = uracil
  modified_base 14: mod_base = OTHER; note = uracil
  source 1..21: mol_type = other DNA
tatgcagactctgtgaagggt

SEQ ID NO: 1082 - DNA, 21 bp, synthetic construct
  misc_feature 1..21: note = synthetic sequence
  modified_base 10: mod_base = OTHER; note = uracil
  modified_base 14: mod_base = OTHER; note = uracil
  source 1..21: mol_type = other DNA
tacgcagactcagtgaagggc

SEQ ID NO: 1083 - DNA, 21 bp, synthetic construct
  misc_feature 1..21: note = synthetic sequence
  modified_base 10: mod_base = OTHER; note = uracil
  modified_base 14: mod_base = OTHER; note = uracil
  source 1..21: mol_type = other DNA
tacgcggactccgtgaagggc

SEQ ID NO: 1084 - DNA, 21 bp, synthetic construct
  misc_feature 1..21: note = synthetic sequence
  modified_base 10: mod_base = OTHER; note = uracil
  modified_base 14: mod_base = OTHER; note = uracil
  source 1..21: mol_type = other DNA
tatgcggactctgtgaagggc

SEQ ID NO: 1085 - DNA, 21 bp, synthetic construct
  misc_feature 1..21: note = synthetic sequence
  modified_base 10: mod_base = OTHER; note = uracil
  modified_base 14: mod_base = OTHER; note = uracil
  source 1..21: mol_type = other DNA
tacgcagactccgtgaagggc

SEQ ID NO: 1086 - DNA, 21 bp, synthetic construct
  misc_feature 1..21: note = synthetic sequence
  modified_base 10: mod_base = OTHER; note = uracil
  modified_base 14: mod_base = OTHER; note = uracil
  source 1..21: mol_type = other DNA
tatgcaaactctgtgaagggc

SEQ ID NO: 1087 - DNA, 21 bp, synthetic construct
  misc_feature 1..21: note = synthetic sequence
  modified_base 3: mod_base = OTHER; note = uracil
  modified_base 10: mod_base = OTHER; note = uracil
  source 1..21: mol_type = other DNA
tatgcagactccgcgaagggc

SEQ ID NO: 1088 - DNA, 21 bp, synthetic construct
  misc_feature 1..21: note = synthetic sequence
  modified_base 10: mod_base = OTHER; note = uracil
  modified_base 14: mod_base = OTHER; note = uracil
  source 1..21: mol_type = other DNA
tacgcagactctgtgaagggc

SEQ ID NO: 1089 - DNA, 21 bp, synthetic construct
  misc_feature 1..21: note = synthetic sequence
  modified_base 10: mod_base = OTHER; note = uracil
  modified_base 14: mod_base = OTHER; note = uracil
  source 1..21: mol_type = other DNA
tatccaggctccgtgaagggc

SEQ ID NO: 1090 - DNA, 19 bp, synthetic construct
  misc_feature 1..19: note = synthetic sequence
  modified_base 4: mod_base = OTHER; note = uracil
  modified_base 12: mod_base = OTHER; note = uracil
  source 1..19: mol_type = other DNA
cgctgcacctgtgaaaggc

SEQ ID NO: 1091 - DNA, 19 bp, synthetic construct
  misc_feature 1..19: note = synthetic sequence
  modified_base 8: mod_base = OTHER; note = uracil
  modified_base 12: mod_base = OTHER; note = uracil
  source 1..19: mol_type = other DNA
cgccgcgtctgtgaaaggc

SEQ ID NO: 1092 - DNA, 19 bp, synthetic construct
  misc_feature 1..19: note = synthetic sequence
  modified_base 8: mod_base = OTHER; note = uracil
  modified_base 12: mod_base = OTHER; note = uracil
  source 1..19: mol_type = other DNA
tgctgcgtcggtgaaaggc

SEQ ID NO: 1093 - DNA, 19 bp, synthetic construct
  misc_feature 1..19: note = synthetic sequence
  modified_base 8: mod_base = OTHER; note = uracil
  modified_base 12: mod_base = OTHER; note = uracil
  source 1..19: mol_type = other DNA
caccgcgtctgtgaaaggc

SEQ ID NO: 1094 - DNA, 19 bp, synthetic construct
  misc_feature 1..19: note = synthetic sequence
  modified_base 4: mod_base = OTHER; note = uracil
  modified_base 12: mod_base = OTHER; note = uracil
  source 1..19: mol_type = other DNA
cgctgcacccgtgaaaggc

SEQ ID NO: 1095 - DNA, 24 bp, synthetic construct
  misc_feature 1..24: note = synthetic sequence
  modified_base 13: mod_base = OTHER; note = uracil
  modified_base 17: mod_base = OTHER; note = uracil
  source 1..24: mol_type = other DNA
aacaacaacccctccctcaagagt

SEQ ID NO: 1096 - DNA, 24 bp, synthetic construct
  misc_feature 1..24: note = synthetic sequence
  modified_base 13: mod_base = OTHER; note = uracil
  modified_base 17: mod_base = OTHER; note = uracil
  source 1..24: mol_type = other DNA
aactacaacccgtccctcaagagt

SEQ ID NO: 1097 - DNA, 24 bp, synthetic construct
  misc_feature 1..24: note = synthetic sequence
  modified_base 13: mod_base = OTHER; note = uracil
  modified_base 17: mod_base = OTHER; note = uracil
  source 1..24: mol_type = other DNA
tactacaacccgtccctcaagagt

SEQ ID NO: 1098 - DNA, 24 bp, synthetic construct
  misc_feature 1..24: note = synthetic sequence
  modified_base 13: mod_base = OTHER; note = uracil
  modified_base 17: mod_base = OTHER; note = uracil
  source 1..24: mol_type = other DNA
aacaacaacccgtccctcaagagt

SEQ ID NO: 1099 - DNA, 24 bp, synthetic construct
  misc_feature 1..24: note = synthetic sequence
  modified_base 13: mod_base = OTHER; note = uracil
  modified_base 17: mod_base = OTHER; note = uracil
  source 1..24: mol_type = other DNA
aactacaacccctccctcaagagt

SEQ ID NO: 1100 - DNA, 22 bp, synthetic construct
  misc_feature 1..22: note = synthetic sequence
  modified_base 5: mod_base = OTHER; note = uracil
  modified_base 15: mod_base = OTHER; note = uracil
  source 1..22: mol_type = other DNA
atattcacaggagttccagggc

SEQ ID NO: 1101 - DNA, 22 bp, synthetic construct
  misc_feature 1..22: note = synthetic sequence
  modified_base 5: mod_base = OTHER; note = uracil
  modified_base 15: mod_base = OTHER; note = uracil
  source 1..22: mol_type = other DNA
atattcacagaagttccagggc

SEQ ID NO: 1102 - DNA, 22 bp, synthetic construct
  misc_feature 1..22: note = synthetic sequence
  modified_base 4: mod_base = OTHER; note = uracil
  modified_base 16: mod_base = OTHER; note = uracil
  source 1..22: mol_type = other DNA
ctatgcacagaagtttcagggc

SEQ ID NO: 1103 - DNA, 22 bp, synthetic construct
  misc_feature 1..22: note = synthetic sequence
  modified_base 4: mod_base = OTHER; note = uracil
  modified_base 15: mod_base = OTHER; note = uracil
  source 1..22: mol_type = other DNA
ctatgcacagaagctccagggc

SEQ ID NO: 1104 - DNA, 22 bp, synthetic construct
  misc_feature 1..22: note = synthetic sequence
  modified_base 2: mod_base = OTHER; note = uracil
  modified_base 15: mod_base = OTHER; note = uracil
  source 1..22: mol_type = other DNA
atacgcagagaagttccagggc

SEQ ID NO: 1105 - DNA, 22 bp, synthetic construct
  misc_feature 1..22: note = synthetic sequence
  modified_base 2: mod_base = OTHER; note = uracil
  modified_base 15: mod_base = OTHER; note = uracil
  source 1..22: mol_type = other DNA
ctacgcacagaagttccagggc

SEQ ID NO: 1106 - DNA, 22 bp, synthetic construct
  misc_feature 1..22: note = synthetic sequence
  modified_base 2: mod_base = OTHER; note = uracil
  modified_base 15: mod_base = OTHER; note = uracil
  source 1..22: mol_type = other DNA
ctacgcacagaaattccaggac

SEQ ID NO: 1107 - DNA, 22 bp, synthetic construct
  misc_feature 1..22: note = synthetic sequence
  modified_base 2: mod_base = OTHER; note = uracil
  modified_base 15: mod_base = OTHER; note = uracil
  source 1..22: mol_type = other DNA
ctacgcacagaagttccaggaa

SEQ ID NO: 1108 - DNA, 22 bp, synthetic construct
  misc_feature 1..22: note = synthetic sequence
  modified_base 4: mod_base = OTHER; note = uracil
  modified_base 15: mod_base = OTHER; note = uracil
  source 1..22: mol_type = other DNA
ctatgcacagaagttccagggc

SEQ ID NO: 1109 - DNA, 22 bp, synthetic construct
  misc_feature 1..22: note = synthetic sequence
  modified_base 4: mod_base = OTHER; note = uracil
  modified_base 15: mod_base = OTHER; note = uracil
  source 1..22: mol_type = other DNA
atatgcagagaagttccagggc

SEQ ID NO: 1110 - DNA, 22 bp, synthetic construct
  misc_feature 1..22: note = synthetic sequence
  modified_base 2: mod_base = OTHER; note = uracil
  modified_base 15: mod_base = OTHER; note = uracil
  source 1..22: mol_type = other DNA
ctacgcacagaagttgcagggc

SEQ ID NO: 1111 - DNA, 24 bp, synthetic construct
  misc_feature 1..24: note = synthetic sequence
  modified_base 11: mod_base = OTHER; note = uracil
  modified_base 17: mod_base = OTHER; note = uracil
  source 1..24: mol_type = other DNA
gattatgcagtatctgtgaaaagt

SEQ ID NO: 1112 - DNA, 24 bp, synthetic construct
  misc_feature 1..24: note = synthetic sequence
  modified_base 6: mod_base = OTHER; note = uracil
  modified_base 17: mod_base = OTHER; note = uracil
  source 1..24: mol_type = other DNA
acgtatgcccagggcttcacagga

SEQ ID NO: 1113 - DNA, 22 bp, synthetic construct
  misc_feature 1..22: note = synthetic sequence
  modified_base 11: mod_base = OTHER; note = uracil
  modified_base 15: mod_base = OTHER; note = uracil
  source 1..22: mol_type = other DNA
ctacagcccgtccttccaaggc

SEQ ID NO: 1114 - DNA, 22 bp, synthetic construct
  misc_feature 1..22: note = synthetic sequence
  modified_base 11: mod_base = OTHER; note = uracil
  modified_base 15: mod_base = OTHER; note = uracil
  source 1..22: mol_type = other DNA
atacagcccgtccttccaaggc

SEQ ID NO: 1115 - DNA, 23 bp, synthetic construct
  misc_feature 1..23: note = synthetic sequence
  source 1..23: mol_type = other DNA
tctacagcacatccctgaagacc

SEQ ID NO: 1116 - DNA, 23 bp, synthetic construct
  misc_feature 1..23: note = synthetic sequence
  source 1..23: mol_type = other DNA
tctacagcacatctctgaagacc

SEQ ID NO: 1117 - DNA, 23 bp, synthetic construct
  misc_feature 1..23: note = synthetic sequence
  source 1..23: mol_type = other DNA
actacagcacatctctgaacacc

SEQ ID NO: 1118 - DNA, 23 bp, synthetic construct
  misc_feature 1..23: note = synthetic sequence
  source 1..23: mol_type = other DNA
gctacggcccatctctgaagagc

SEQ ID NO: 1119 - DNA, 23 bp, synthetic construct
  misc_feature 1..23: note = synthetic sequence
  source 1..23: mol_type = other DNA
actacagcacatctctgaagacc

SEQ ID NO: 1120 - DNA, 23 bp, synthetic construct
  misc_feature 1..23: note = synthetic sequence
  source 1..23: mol_type = other DNA
gctacagcccatctctgaagagc

SEQ ID NO: 1121 - DNA, 23 bp, synthetic construct
  misc_feature 1..23: note = synthetic sequence
  source 1..23: mol_type = other DNA
cctacagcacatctctgaagagc

SEQ ID NO: 1122 - DNA, 21 bp, synthetic construct
  misc_feature 1..21: note = synthetic sequence
  source 1..21: mol_type = other DNA
tatccaggctccgtgaagggg

SEQ ID NO: 1123 - DNA, 21 bp, synthetic construct
  misc_feature 1..21: note = synthetic sequence
  source 1..21: mol_type = other DNA
tacacagactccgtgaagggc

SEQ ID NO: 1124 - DNA, 21 bp, synthetic construct
  misc_feature 1..21: note = synthetic sequence
  source 1..21: mol_type = other DNA
tatgcagactctgtgaagggc

SEQ ID NO: 1125 - DNA, 21 bp, synthetic construct
  misc_feature 1..21: note = synthetic sequence
  source 1..21: mol_type = other DNA
tacggagactccgtgaagggc

SEQ ID NO: 1126 - DNA, 21 bp, synthetic construct
  misc_feature 1..21: note = synthetic sequence
  source 1..21: mol_type = other DNA
tatgtggactctgtgaagggc

SEQ ID NO: 1127 - DNA, 21 bp, synthetic construct
  misc_feature 1..21: note = synthetic sequence
  source 1..21: mol_type = other DNA
tatgcagactccgtgaagggc

SEQ ID NO: 1128 - DNA, 21 bp, synthetic construct
  misc_feature 1..21: note = synthetic sequence
  source 1..21: mol_type = other DNA
tacacagactctgtgaagggc

SEQ ID NO: 1129 - DNA, 21 bp, synthetic construct
  misc_feature 1..21: note = synthetic sequence
  source 1..21: mol_type = other DNA
tatgcagactctgtgaagggt

SEQ ID NO: 1130 - DNA, 21 bp, synthetic construct
  misc_feature 1..21: note = synthetic sequence
  source 1..21: mol_type = other DNA
tacgcagactcagtgaagggc

SEQ ID NO: 1131 - DNA, 21 bp, synthetic construct
  misc_feature 1..21: note = synthetic sequence
  source 1..21: mol_type = other DNA
tacgcggactccgtgaagggc

SEQ ID NO: 1132 - DNA, 21 bp, synthetic construct
  misc_feature 1..21: note = synthetic sequence
  source 1..21: mol_type = other DNA
tatgcggactctgtgaagggc

SEQ ID NO: 1133 - DNA, 21 bp, synthetic construct
  misc_feature 1..21: note = synthetic sequence
  source 1..21: mol_type = other DNA
tacgcagactccgtgaagggc

SEQ ID NO: 1134 - DNA, 21 bp, synthetic construct
  misc_feature 1..21: note = synthetic sequence
  source 1..21: mol_type = other DNA
tatgcaaactctgtgaagggc

SEQ ID NO: 1135 - DNA, 21 bp, synthetic construct
  misc_feature 1..21: note = synthetic sequence
  source 1..21: mol_type = other DNA
tatgcagactccgcgaagggc

SEQ ID NO: 1136 - DNA, 21 bp, synthetic construct
  misc_feature 1..21: note = synthetic sequence
  source 1..21: mol_type = other DNA
tacgcagactctgtgaagggc

SEQ ID NO: 1137 - DNA, 21 bp, synthetic construct
  misc_feature 1..21: note = synthetic sequence
  source 1..21: mol_type = other DNA
tatccaggctccgtgaagggc

SEQ ID NO: 1138 - DNA, 19 bp, synthetic construct
  misc_feature 1..19: note = synthetic sequence
  source 1..19: mol_type = other DNA
cgctgcacctgtgaaaggc

SEQ ID NO: 1139 - DNA, 19 bp, synthetic construct
  misc_feature 1..19: note = synthetic sequence
  source 1..19: mol_type = other DNA
cgccgcgtctgtgaaaggc

SEQ ID NO: 1140 - DNA, 19 bp, synthetic construct
  misc_feature 1..19: note = synthetic sequence
  source 1..19: mol_type = other DNA
tgctgcgtcggtgaaaggc

SEQ ID NO: 1141 - DNA, 19 bp, synthetic construct
  misc_feature 1..19: note = synthetic sequence
  source 1..19: mol_type = other DNA
caccgcgtctgtgaaaggc

SEQ ID NO: 1142 - DNA, 19 bp, synthetic construct
  misc_feature 1..19: note = synthetic sequence
  source 1..19: mol_type = other DNA
cgctgcacccgtgaaaggc

SEQ ID NO: 1143 - DNA, 24 bp, synthetic construct
  misc_feature 1..24: note = synthetic sequence
  source 1..24: mol_type = other DNA
aacaacaacccctccctcaagagt

SEQ ID NO: 1144 - DNA, 24 bp, synthetic construct
  misc_feature 1..24: note = synthetic sequence
  source 1..24: mol_type = other DNA
aactacaacccgtccctcaagagt

SEQ ID NO: 1145 - DNA, 24 bp, synthetic construct
  misc_feature 1..24: note = synthetic sequence
  source 1..24: mol_type = other DNA
tactacaacccgtccctcaagagt

SEQ ID NO: 1146 - DNA, 24 bp, synthetic construct
  misc_feature 1..24: note = synthetic sequence
  source 1..24: mol_type = other DNA
aacaacaacccgtccctcaagagt

SEQ ID NO: 1147 - DNA, 24 bp, synthetic construct
  misc_feature 1..24: note = synthetic sequence
  source 1..24: mol_type = other DNA
aactacaacccctccctcaagagt

SEQ ID NO: 1148 - DNA, 22 bp, synthetic construct
  misc_feature 1..22: note = synthetic sequence
  source 1..22: mol_type = other DNA
atattcacaggagttccagggc

SEQ ID NO: 1149 - DNA, 22 bp, synthetic construct
  misc_feature 1..22: note = synthetic sequence
  source 1..22: mol_type = other DNA
atattcacagaagttccagggc

SEQ ID NO: 1150 - DNA, 22 bp, synthetic construct
  misc_feature 1..22: note = synthetic sequence
  source 1..22: mol_type = other DNA
ctatgcacagaagtttcagggc

SEQ ID NO: 1151 - DNA, 22 bp, synthetic construct
  misc_feature 1..22: note = synthetic sequence
  source 1..22: mol_type = other DNA
ctatgcacagaagctccagggc

SEQ ID NO: 1152 - DNA, 22 bp, synthetic construct
  misc_feature 1..22: note = synthetic sequence
  source 1..22: mol_type = other DNA
atacgcagagaagttccagggc

SEQ ID NO: 1153 - DNA, 22 bp, synthetic construct
  misc_feature 1..22: note = synthetic sequence
  source 1..22: mol_type = other DNA
ctacgcacagaagttccagggc

SEQ ID NO: 1154 - DNA, 22 bp, synthetic construct
  misc_feature 1..22: note = synthetic sequence
  source 1..22: mol_type = other DNA
ctacgcacagaaattccaggac

SEQ ID NO: 1155 - DNA, 22 bp, synthetic construct
  misc_feature 1..22: note = synthetic sequence
  source 1..22: mol_type = other DNA
ctacgcacagaagttccaggaa

SEQ ID NO: 1156 - DNA, 22 bp, synthetic construct
  misc_feature 1..22: note = synthetic sequence
  source 1..22: mol_type = other DNA
ctatgcacagaagttccagggc

SEQ ID NO: 1157 - DNA, 22 bp, synthetic construct
  misc_feature 1..22: note = synthetic sequence
  source 1..22: mol_type = other DNA
atatgcagagaagttccagggc

SEQ ID NO: 1158 - DNA, 22 bp, synthetic construct
  misc_feature 1..22: note = synthetic sequence
  source 1..22: mol_type = other DNA
ctacgcacagaagttgcagggc

SEQ ID NO: 1159 - DNA, 24 bp, synthetic construct
  misc_feature 1..24: note = synthetic sequence
  source 1..24: mol_type = other DNA
gattatgcagtatctgtgaaaagt

SEQ ID NO: 1160 - DNA, 24 bp, synthetic construct
  misc_feature 1..24: note = synthetic sequence
  source 1..24: mol_type = other DNA
acgtatgcccagggcttcacagga

SEQ ID NO: 1161 - DNA, 22 bp, synthetic construct
  misc_feature 1..22: note = synthetic sequence
  source 1..22: mol_type = other DNA
ctacagcccgtccttccaaggc

SEQ ID NO: 1162 - DNA, 22 bp, synthetic construct
  misc_feature 1..22: note = synthetic sequence
  source 1..22: mol_type = other DNA
atacagcccgtccttccaaggc

SEQ ID NO: 1163 - DNA, 17 bp, synthetic construct
  misc_feature 1..17: note = synthetic sequence
  source 1..17: mol_type = other DNA
catgcagctgagcagcc

SEQ ID NO: 1164 - DNA, 17 bp, synthetic construct
  misc_feature 1..17: note = synthetic sequence
  source 1..17: mol_type = other DNA
catggagctgagcaggc

SEQ ID NO: 1165 - DNA, 17 bp, synthetic construct
  misc_feature 1..17: note = synthetic sequence
  source 1..17: mol_type = other DNA
ggagctgagcagcctga

SEQ ID NO: 1166 - DNA, 17 bp, synthetic construct
  misc_feature 1..17: note = synthetic sequence
  source 1..17: mol_type = other DNA
agagctgagcagcctga

SEQ ID NO: 1167 - DNA, 17 bp, synthetic construct
  misc_feature 1..17: note = synthetic sequence
  source 1..17: mol_type = other DNA
ggagctgaggagcctga

SEQ ID NO: 1168 - DNA, 18 bp, synthetic construct
  misc_feature 1..18: note = synthetic sequence
  source 1..18: mol_type = other DNA
cacagacctgagcagcct

SEQ ID NO: 1169 - DNA, 18 bp, synthetic construct
  misc_feature 1..18: note = synthetic sequence
  source 1..18: mol_type = other DNA
tggagctaagcagcctga

SEQ ID NO: 1170 - DNA, 19 bp, synthetic construct
  misc_feature 1..19: note = synthetic sequence
  source 1..19: mol_type = other DNA
catggagctgaggagccta

SEQ ID NO: 1171 - DNA, 23 bp, synthetic construct
  misc_feature 1..23: note = synthetic sequence
  source 1..23: mol_type = other DNA
atggagctaagcagtctgagatc

SEQ ID NO: 1172 - DNA, 23 bp, synthetic construct
  misc_feature 1..23: note = synthetic sequence
  source 1..23: mol_type = other DNA
tccttaccatgaccaacatggac

SEQ ID NO: 1173 - DNA, 24 bp, synthetic construct
  misc_feature 1..24: note = synthetic sequence
  source 1..24: mol_type = other DNA
gtggtccttacaatgaccaacatg

SEQ ID NO: 1174 - DNA, 25 bp, synthetic construct
  misc_feature 1..25: note = synthetic sequence
  source 1..25: mol_type = other DNA
ggttctaacagtgatcaacatggac

SEQ ID NO: 1175 - DNA, 22 bp, synthetic construct
  misc_feature 1..22: note = synthetic sequence
  source 1..22: mol_type = other DNA
acacggcgtatctgcaaatgaa

SEQ ID NO: 1176 - DNA, 22 bp, synthetic construct
  misc_feature 1..22: note = synthetic sequence
  source 1..22: mol_type = other DNA
cacgctgtatgtccaaatgagc

SEQ ID NO: 1177 - DNA, 23 bp, synthetic construct
  misc_feature 1..23: note = synthetic sequence
  source 1..23: mol_type = other DNA
aacacgctctacctgcaaatgaa

SEQ ID NO: 1178 - DNA, 24 bp, synthetic construct
  misc_feature 1..24: note = synthetic sequence
  source 1..24: mol_type = other DNA
gaactcaccgtatctgcaaacgaa

SEQ ID NO: 1179 - DNA, 24 bp, synthetic construct
  misc_feature 1..24: note = synthetic sequence
  source 1..24: mol_type = other DNA
gaacacgctgtatgttcaaatgag

SEQ ID NO: 1180 - DNA, 24 bp, synthetic construct
  misc_feature 1..24: note = synthetic sequence
  source 1..24: mol_type = other DNA
gaacacgctgtttctgcaaatgaa

SEQ ID NO: 1181 - DNA, 24 bp, synthetic construct
  misc_feature 1..24: note = synthetic sequence
  source 1..24: mol_type = other DNA
aagcatcgcctatctgcaaatgaa

SEQ ID NO: 1182 - DNA, 24 bp, synthetic construct
  misc_feature 1..24: note = synthetic sequence
  source 1..24: mol_type = other DNA
gaacaccctgtatctgcaaacgaa

SEQ ID NO: 1183 - DNA, 25 bp, synthetic construct
  misc_feature 1..25: note = synthetic sequence
  source 1..25: mol_type = other DNA
agaacacgctgtatctgcaaatgag

SEQ ID NO: 1184 - DNA, 25 bp, synthetic construct
  misc_feature 1..25: note = synthetic sequence
  source 1..25: mol_type = other DNA
ggaactccctgtatctgcaaaagaa

SEQ ID NO: 1185 - DNA, 25 bp, synthetic construct
  misc_feature 1..25: note = synthetic sequence
  source 1..25: mol_type = other DNA
gcaagtccctgtatctgcaaaagaa

SEQ ID NO: 1186 - DNA, 25 bp, synthetic construct
  misc_feature 1..25: note = synthetic sequence
  source 1..25: mol_type = other DNA
gaacacgctgcatcttcaaatgaac

SEQ ID NO: 1187 - DNA, 25 bp, synthetic construct
  misc_feature 1..25: note = synthetic sequence
  source 1..25: mol_type = other DNA
gaactcactccgtttgcaaatgaac

SEQ ID NO: 1188 - DNA, 25 bp, synthetic construct
  misc_feature 1..25: note = synthetic sequence
  source 1..25: mol_type = other DNA
gaacacgctgtatctgcaaatgaac

SEQ ID NO: 1189 - DNA, 26 bp, synthetic construct
  misc_feature 1..26: note = synthetic sequence
  source 1..26: mol_type = other DNA
aagaacacgctgtatcttcaaatggg

SEQ ID NO: 1190 - DNA, 26 bp, synthetic construct
  misc_feature 1..26: note = synthetic sequence
  source 1..26: mol_type = other DNA
aagaactccctctatctgcaagtgaa

SEQ ID NO: 1191 - DNA, 26 bp, synthetic construct
  misc_feature 1..26: note = synthetic sequence
  source 1..26: mol_type = other DNA
aagaacaggctgtatctgcaaatgaa

SEQ ID NO: 1192 - DNA, 27 bp, synthetic construct
  misc_feature 1..27: note = synthetic sequence
  source 1..27: mol_type = other DNA
caaaaactccctgtatctgcaaatgaa

SEQ ID NO: 1193 - DNA, 27 bp, synthetic construct
  misc_feature 1..27: note = synthetic sequence
  source 1..27: mol_type = other DNA
taagaactcaccgtatctccaaacgaa

SEQ ID NO: 1194 - DNA, 27 bp, synthetic construct
  misc_feature 1..27: note = synthetic sequence
  source 1..27: mol_type = other DNA
ccagaattcactgtctctgcaaatgaa

SEQ ID NO: 1195 - DNA, 27 bp, synthetic construct
  misc_feature 1..27: note = synthetic sequence
  source 1..27: mol_type = other DNA
caggaacttcctgtatcagcaaatgaa

SEQ ID NO: 1196 - DNA, 27 bp, synthetic construct
  misc_feature 1..27: note = synthetic sequence
  source 1..27: mol_type = other DNA
caagaacacgctgtatcttcaaatgag

SEQ ID NO: 1197 - DNA, 27 bp, synthetic construct
  misc_feature 1..27: note = synthetic sequence
  source 1..27: mol_type = other DNA
caagaactccctgtatctgcaaatgaa

SEQ ID NO: 1198 - DNA, 27 bp, synthetic construct
  misc_feature 1..27: note = synthetic sequence
  source 1..27: mol_type = other DNA
caagaactcactctgtttgcaaatgaa

SEQ ID NO: 1199 - DNA, 28 bp, synthetic construct
  misc_feature 1..28: note = synthetic sequence
  source 1..28: mol_type = other DNA
caaaaaacacgctgtatctgcaaatgat

SEQ ID NO: 1200 - DNA, 28 bp, synthetic construct
  misc_feature 1..28: note = synthetic sequence
  source 1..28: mol_type = other DNA
caaagaacacgatgtatctgcaaatgag

SEQ ID NO: 1201 - DNA, 28 bp, synthetic construct
  misc_feature 1..28: note = synthetic sequence
  source 1..28: mol_type = other DNA
caagaactcactgtatctgcaaatgaac

SEQ ID NO: 1202 - DNA, 28 bp, synthetic construct
  misc_feature 1..28: note = synthetic sequence
  source 1..28: mol_type = other DNA
ccaagaactcactgtatttgctaatgaa

SEQ ID NO: 1203 - DNA, 28 bp, synthetic construct
  misc_feature 1..28: note = synthetic sequence
  source 1..28: mol_type = other DNA
ccaagaactcactgtatttgcaaatgaa

SEQ ID NO: 1204 - DNA, 28 bp, synthetic construct
  misc_feature 1..28: note = synthetic sequence
  source 1..28: mol_type = other DNA
ccaataactcaccgtatctgcaaatgaa

SEQ ID NO: 1205 - DNA, 28 bp, synthetic construct
  misc_feature 1..28: note = synthetic sequence
  source 1..28: mol_type = other DNA
caaaaaacacgctgtatctgcaaatgaa

SEQ ID NO: 1206 - DNA, 28 bp, synthetic construct
  misc_feature 1..28: note = synthetic sequence
  source 1..28: mol_type = other DNA
caagaacacgctgtatcttcaaatgaac

SEQ ID NO: 1207 - DNA, 28 bp, synthetic construct
  misc_feature 1..28: note = synthetic sequence
  source 1..28: mol_type = other DNA
caaaagcatcacctatctgcaaatgaac

SEQ ID NO: 1208 - DNA, 28 bp, synthetic construct
  misc_feature 1..28: note = synthetic sequence
  source 1..28: mol_type = other DNA
caagaacacacttcatctgcaaatgaac

SEQ ID NO: 1209 - DNA, 28 bp, synthetic construct
  misc_feature 1..28: note = synthetic sequence
  source 1..28: mol_type = other DNA
caaaagcatcacctatctgcaaatgaag

SEQ ID NO: 1210 - DNA, 29 bp, synthetic construct
  misc_feature 1..29: note = synthetic sequence
  source 1..29: mol_type = other DNA
tcaaagaactcactgtatctgcaaatgaa

SEQ ID NO: 1211 - DNA, 29 bp, synthetic construct
  misc_feature 1..29: note = synthetic sequence
  source 1..29: mol_type = other DNA
gctaagaactctctgtatctgcaaatgaa

SEQ ID NO: 1212 - DNA, 29 bp, synthetic construct
  misc_feature 1..29: note = synthetic sequence
  source 1..29: mol_type = other DNA
ccaagaactccttgtatcttcaaatgaac

SEQ ID NO: 1213 - DNA, 29 bp, synthetic construct
  misc_feature 1..29: note = synthetic sequence
  source 1..29: mol_type = other DNA
ccaagaagtccttgtatcttcaaatgaac

SEQ ID NO: 1214 - DNA, 30 bp, synthetic construct
  misc_feature 1..30: note = synthetic sequence
  source 1..30: mol_type = other DNA
gccaagaagtccttgtatcttcatatgaac

SEQ ID NO: 1215 - DNA, 19 bp, synthetic construct
  misc_feature 1..19: note = synthetic sequence
  source 1..19: mol_type = other DNA
cagttccccctgaagctga

SEQ ID NO: 1216 - DNA, 20 bp, synthetic construct
  misc_feature 1..20: note = synthetic sequence
  source 1..20: mol_type = other DNA
cagttctccctgaagctggg

SEQ ID NO: 1217 - DNA, 20 bp, synthetic construct
  misc_feature 1..20: note = synthetic sequence
  source 1..20: mol_type = other DNA
cagttctccctgaagccgag

SEQ ID NO: 1218 - DNA, 21 bp, synthetic construct
  misc_feature 1..21: note = synthetic sequence
  source 1..21: mol_type = other DNA
ccagttctccctgaagctgag

SEQ ID NO: 1219 - DNA, 22 bp, synthetic construct
  misc_feature 1..22: note = synthetic sequence
  source 1..22: mol_type = other DNA
aaccagttctccctgaacctga

SEQ ID NO: 1220 - DNA, 22 bp, synthetic construct
  misc_feature 1..22: note = synthetic sequence
  source 1..22: mol_type = other DNA
aaccacttctccctgaagctga

SEQ ID NO: 1221 - DNA, 23 bp, synthetic construct
  misc_feature 1..23: note = synthetic sequence
  source 1..23: mol_type = other DNA
gaaccaattctccctgaagctga

SEQ ID NO: 1222 - DNA, 24 bp, synthetic construct
  misc_feature 1..24: note = synthetic sequence
  source 1..24: mol_type = other DNA
agaaccagttctacctgaagctga

SEQ ID NO: 1223 - DNA, 24 bp, synthetic construct
  misc_feature 1..24: note = synthetic sequence
  source 1..24: mol_type = other DNA
agaagcagttctacctgaagctga

SEQ ID NO: 1224 - DNA, 17 bp, synthetic construct
  misc_feature 1..17: note = synthetic sequence
  source 1..17: mol_type = other DNA
gcagtggagcagcctga

SEQ ID NO: 1225 - DNA, 19 bp, synthetic construct
  misc_feature 1..19: note = synthetic sequence
  source 1..19: mol_type = other DNA
cagttctccctgcagctga

SEQ ID NO: 1226 - DNA, 21 bp, synthetic construct
  misc_feature 1..21: note = synthetic sequence
  source 1..21: mol_type = other DNA
atctgcagatcagcacgctaa

SEQ ID NO: 1227 - DNA, 22 bp, synthetic construct
  misc_feature 1..22: note = synthetic sequence
  source 1..22: mol_type = other DNA
tatctgcagatcagcagcctaa

SEQ ID NO: 1228 - DNA, 22 bp, synthetic construct
  misc_feature 1..22: note = synthetic sequence
  source 1..22: mol_type = other DNA
tgtcttcagatcagcagcctaa

SEQ ID NO: 1229 - DNA, 22 bp, synthetic construct
  misc_feature 1..22: note = synthetic sequence
  source 1..22: mol_type = other DNA
tacctgcagatcagcagcctaa

SEQ ID NO: 1230 - DNA, 22 bp, synthetic construct
  misc_feature 1..22: note = synthetic sequence
  source 1..22: mol_type = other DNA
tatctgcagatctgcagcctaa

SEQ ID NO: 1231 - DNA, 25 bp, synthetic construct
  misc_feature 1..25: note = synthetic sequence
  source 1..25: mol_type = other DNA
tggagctgagcagcctgagatctga

SEQ ID NO: 1232 - DNA, 25 bp, synthetic construct
  misc_feature 1..25: note = synthetic sequence
  source 1..25: mol_type = other DNA
caatgaccaacatggaccctgtgga

SEQ ID NO: 1233 - DNA, 25 bp, synthetic construct
  misc_feature 1..25: note = synthetic sequence
  source 1..25: mol_type = other DNA
tctgcaaatgaacagcctgagagcc

SEQ ID NO: 1234 - DNA, 25 bp, synthetic construct
  misc_feature 1..25: note = synthetic sequence
  source 1..25: mol_type = other DNA
gagctctgtgaccgccgcggacacg

SEQ ID NO: 1235 - DNA, 25 bp, synthetic construct
  misc_feature 1..25: note = synthetic sequence
  source 1..25: mol_type = other DNA
cagcaccgcctacctgcagtggagc

SEQ ID NO: 1236 - DNA, 25 bp, synthetic construct
  misc_feature 1..25: note = synthetic sequence
  source 1..25: mol_type = other DNA
gttctccctgcagctgaactctgtg

SEQ ID NO: 1237 - DNA, 24 bp, synthetic construct
  misc_feature 1..24: note = synthetic sequence
  source 1..24: mol_type = other DNA
cagcacggcatatctgcagatcag

SEQ ID NO: 1238 - DNA, 22 bp, synthetic construct
  misc_feature 1..22: note = synthetic sequence
  source 1..22: mol_type = other DNA
cacagtctacatggagctgagc

SEQ ID NO: 1239 - DNA, 22 bp, synthetic construct
  misc_feature 1..22: note = synthetic sequence
  source 1..22: mol_type = other DNA
cacagcctacatgcagctgagc

SEQ ID NO: 1240 - DNA, 22 bp, synthetic construct
  misc_feature 1..22: note = synthetic sequence
  source 1..22: mol_type = other DNA
cacagcctacacggagctgagc

SEQ ID NO: 1241 - DNA, 22 bp, synthetic construct
  misc_feature 1..22: note = synthetic sequence
  source 1..22: mol_type = other DNA
cacagcctacatggagctgagg

SEQ ID NO: 1242 - DNA, 22 bp, synthetic construct
  misc_feature 1..22: note = synthetic sequence
  source 1..22: mol_type = other DNA
cacagcctacacagacctgagc

SEQ ID NO: 1243 - DNA, 22 bp, synthetic construct
  misc_feature 1..22: note = synthetic sequence
  source 1..22: mol_type = other DNA
cacagcctgcacggagctgagc

SEQ ID NO: 1244 - DNA, 22 bp, synthetic construct
  misc_feature 1..22: note = synthetic sequence
  source 1..22: mol_type = other DNA
cacagcctacatggagctaagc

SEQ ID NO: 1245 - DNA, 22 bp, synthetic construct
  misc_feature 1..22: note = synthetic sequence
  source 1..22: mol_type = other DNA
cacagcctacatggagctgagc

SEQ ID NO: 1246 - DNA, 22 bp, synthetic construct
  misc_feature 1..22: note = synthetic sequence
  source 1..22: mol_type = other DNA
gacagcctacatagagctgagc

SEQ ID NO: 1247 - DNA, 26 bp, synthetic construct
  misc_feature 1..26: note = synthetic sequence
  source 1..26: mol_type = other DNA
caagaatgaagtggttctaacagtga

SEQ ID NO: 1248 - DNA, 26 bp, synthetic construct
  misc_feature 1..26: note = synthetic sequence
  source 1..26: mol_type = other DNA
caaaaaccaggtggtccttacaatga

SEQ ID NO: 1249 - DNA, 26 bp, synthetic construct
  misc_feature 1..26: note = synthetic sequence
  source 1..26: mol_type = other DNA
caaaagccaggtggtccttaccatga

SEQ ID NO: 1250 - DNA, 27 bp, synthetic construct
  misc_feature 1..27: note = synthetic sequence
  source 1..27: mol_type = other DNA
aacacgctctacctgcaaatgaacagc

SEQ ID NO: 1251 - DNA, 27 bp, synthetic construct
  misc_feature 1..27: note = synthetic sequence
  source 1..27: mol_type = other DNA
aagtccttgtatcttcaaatgaacagc

SEQ ID NO: 1252 - DNA, 27 bp, synthetic construct
  misc_feature 1..27: note = synthetic sequence
  source 1..27: mol_type = other DNA
aagtccctgtatctgcaaaagaacaga

SEQ ID NO: 1253 - DNA, 27 bp, synthetic construct
  misc_feature 1..27: note = synthetic sequence
  source 1..27: mol_type = other DNA
aacacgctgtatctgcaaatgaacagc

SEQ ID NO: 1254 - DNA, 27 bp, synthetic construct
  misc_feature 1..27: note = synthetic sequence
  source 1..27: mol_type = other DNA
aactccctgtatctgcaaaagaacaga

SEQ ID NO: 1255 - DNA, 27 bp, synthetic construct
  misc_feature 1..27: note = synthetic sequence
  source 1..27: mol_type = other DNA
aactctctgtatctgcaaatgaacact

SEQ ID NO: 1256 - DNA, 27 bp, synthetic construct
  misc_feature 1..27: note = synthetic sequence
  source 1..27: mol_type = other DNA
aattcactgtctctgcaaatgaacagc

SEQ ID NO: 1257 - DNA, 27 bp, synthetic construct
  misc_feature 1..27: note = synthetic sequence
  source 1..27: mol_type = other DNA
aactcactgtatttgcaaatgaacagt

SEQ ID NO: 1258 - DNA, 27 bp, synthetic construct
  misc_feature 1..27: note = synthetic sequence
  source 1..27: mol_type = other DNA
aactcaccgtatctgcaaacgaacagt

SEQ ID NO: 1259 - DNA, 27 bp, synthetic construct
  misc_feature 1..27: note = synthetic sequence
  source 1..27: mol_type = other DNA
aacacgctgtatgttcaaatgagcagt

SEQ ID NO: 1260 - DNA, 27 bp, synthetic construct
  misc_feature 1..27: note = synthetic sequence
  source 1..27: mol_type = other DNA
aactcactctgtttgcaaatgaacagt

SEQ ID NO: 1261 - DNA, 27 bp, synthetic construct
  misc_feature 1..27: note = synthetic sequence
  source 1..27: mol_type = other DNA
aacacgctgcatcttcaaatgaacagc

SEQ ID NO: 1262 - DNA, 27 bp, synthetic construct
  misc_feature 1..27: note = synthetic sequence
  source 1..27: mol_type = other DNA
aagtccttgtatcttcatatgaacagc

SEQ ID NO: 1263 - DNA, 27 bp, synthetic construct
  misc_feature 1..27: note = synthetic sequence
  source 1..27: mol_type = other DNA
aacacgctgtatctgcaaatgatcagc

SEQ ID NO: 1264 - DNA, 27 bp, synthetic construct
  misc_feature 1..27: note = synthetic sequence
  source 1..27: mol_type = other DNA
aactcactccgtttgcaaatgaacagt

SEQ ID NO: 1265 - DNA, 27 bp, synthetic construct
  misc_feature 1..27: note = synthetic sequence
  source 1..27: mol_type = other DNA
aacacgctgtttctgcaaatgaacagc

SEQ ID NO: 1266 - DNA, 27 bp, synthetic construct
  misc_feature 1..27: note = synthetic sequence
  source 1..27: mol_type = other DNA
aactccttgtatcttcaaatgaacagc

SEQ ID NO: 1267 - DNA, 27 bp, synthetic construct
  misc_feature 1..27: note = synthetic sequence
  source 1..27: mol_type = other DNA
aacttcctgtatcagcaaatgaacagc

SEQ ID NO: 1268 - DNA, 27 bp, synthetic construct
  misc_feature 1..27: note = synthetic sequence
  source 1..27: mol_type = other DNA
aacacgctgtatcttcaaatgaacagc

SEQ ID NO: 1269 - DNA, 27 bp, synthetic construct
  misc_feature 1..27: note = synthetic sequence
  source 1..27: mol_type = other DNA
aactcaccgtatctgcaaatgaacagc

SEQ ID NO: 1270 - DNA, 27 bp, synthetic construct
  misc_feature 1..27: note = synthetic sequence
  source 1..27: mol_type = other DNA
aactcactgtatctgcaaatgaacagc

SEQ ID NO: 1271 - DNA, 27 bp, synthetic construct
  misc_feature 1..27: note = synthetic sequence
  source 1..27: mol_type = other DNA
aacacgatgtatctgcaaatgagcaac

SEQ ID NO: 1272 - DNA, 27 bp, synthetic construct
  misc_feature 1..27: note = synthetic sequence
  source 1..27: mol_type = other DNA
agcatcacctatctgcaaatgaacagc

SEQ ID NO: 1273 - DNA, 27 bp, synthetic construct
  misc_feature 1..27: note = synthetic sequence
  source 1..27: mol_type = other DNA
aacacgctgtatcttcaaatgagcagt

SEQ ID NO: 1274 - DNA, 27 bp, synthetic construct
  misc_feature 1..27: note = synthetic sequence
  source 1..27: mol_type = other DNA
aactctctgtatctgcaaatgaacagt

SEQ ID NO: 1275 - DNA, 27 bp, synthetic construct
  misc_feature 1..27: note = synthetic sequence
  source 1..27: mol_type = other DNA
aacacgctgtatgtccaaatgagcagt

SEQ ID NO: 1276 - DNA, 27 bp, synthetic construct
  misc_feature 1..27: note = synthetic sequence
  source 1..27: mol_type = other DNA
aacacggcgtatctgcaaatgaacagc

SEQ ID NO: 1277 - DNA, 27 bp, synthetic construct
  misc_feature 1..27: note = synthetic sequence
  source 1..27: mol_type = other DNA
agcatcacctatctgcaaatgaagagc

SEQ ID NO: 1278 - DNA, 27 bp, synthetic construct
  misc_feature 1..27: note = synthetic sequence
  source 1..27: mol_type = other DNA
aacacgctgtatcttcaaatgaacaac

SEQ ID NO: 1279 - DNA, 27 bp, synthetic construct
  misc_feature 1..27: note = synthetic sequence
  source 1..27: mol_type = other DNA
aacacgctgtatctgcaaatgaacagt

SEQ ID NO: 1280 - DNA, 27 bp, synthetic construct
  misc_feature 1..27: note = synthetic sequence
  source 1..27: mol_type = other DNA
aactccctctatctgcaagtgaacagc

SEQ ID NO: 1281 - DNA, 27 bp, synthetic construct
  misc_feature 1..27: note = synthetic sequence
  source 1..27: mol_type = other DNA
aactccctgtatctgcaaatgaacagt

SEQ ID NO: 1282 - DNA, 27 bp, synthetic construct
  misc_feature 1..27: note = synthetic sequence
  source 1..27: mol_type = other DNA
agcatcgcctatctgcaaatgaacagc

SEQ ID NO: 1283 - DNA, 27 bp, synthetic construct
  misc_feature 1..27: note = synthetic sequence
  source 1..27: mol_type = other DNA
aacacgctgtatctgcaaatgagcaac

SEQ ID NO: 1284 - DNA, 27 bp, synthetic construct
  misc_feature 1..27: note = synthetic sequence
  source 1..27: mol_type = other DNA
aacaccctgtatctgcaaacgaatagc

SEQ ID NO: 1285 - DNA, 27 bp, synthetic construct
  misc_feature 1..27: note = synthetic sequence
  source 1..27: mol_type = other DNA
aacacacttcatctgcaaatgaacagc

SEQ ID NO: 1286 - DNA, 27 bp, synthetic construct
  misc_feature 1..27: note = synthetic sequence
  source 1..27: mol_type = other DNA
aacaggctgtatctgcaaatgaacagc

SEQ ID NO: 1287 - DNA, 27 bp, synthetic construct
  misc_feature 1..27: note = synthetic sequence
  source 1..27: mol_type = other DNA
aactcaccgtatctccaaacgaacagt

SEQ ID NO: 1288 - DNA, 27 bp, synthetic construct
  misc_feature 1..27: note = synthetic sequence
  source 1..27: mol_type = other DNA
aacacgctgtatcttcaaatgggcagc

SEQ ID NO: 1289 - DNA, 27 bp, synthetic construct
  misc_feature 1..27: note = synthetic sequence
  source 1..27: mol_type = other DNA
aactcactgtatttgctaatgaacagt

SEQ ID NO: 1290 - DNA, 27 bp, synthetic construct
  misc_feature 1..27: note = synthetic sequence
  source 1..27: mol_type = other DNA
aacacgctgtatctgcaaatgagcagc

SEQ ID NO: 1291 - DNA, 23 bp, synthetic construct
  misc_feature 1..23: note = synthetic sequence
  source 1..23: mol_type = other DNA
cctgaagctgagctctgtgactg

SEQ ID NO: 1292 - DNA, 23 bp, synthetic construct
  misc_feature 1..23: note = synthetic sequence
  source 1..23: mol_type = other DNA
cctgaagccgagctctgtgactg

SEQ ID NO: 1293 - DNA, 23 bp, synthetic construct
  misc_feature 1..23: note = synthetic sequence
  source 1..23: mol_type = other DNA
cctgaacctgagctctgtgaccg

SEQ ID NO: 1294 - DNA, 23 bp, synthetic construct
  misc_feature 1..23: note = synthetic sequence
  source 1..23: mol_type = other DNA
cctgaagctgagctctgtgaccg

SEQ ID NO: 1295 - DNA, 23 bp, synthetic construct
  misc_feature 1..23: note = synthetic sequence
  source 1..23: mol_type = other DNA
cctgaagctgggctctgtgaccg

SEQ ID NO: 1296 - DNA, 25 bp, synthetic construct
  misc_feature 1..25: note = synthetic sequence
  source 1..25: mol_type = other DNA
gacaagtccatcagcaccgcctacc

SEQ ID NO: 1297 - DNA, 25 bp, synthetic construct
  misc_feature 1..25: note = synthetic sequence
  source 1..25: mol_type = other DNA
gacagctccagcagcaccgcctacc

SEQ ID NO: 1298 - DNA, 25 bp, synthetic construct
  misc_feature 1..25: note = synthetic sequence
  source 1..25: mol_type = other DNA
gacaagcccatcagcaccgcctacc

SEQ ID NO: 1299 - DNA, 25 bp, synthetic construct
  misc_feature 1..25: note = synthetic sequence
  source 1..25: mol_type = other DNA
gacaagtccatcagcactgcctacc

SEQ ID NO: 1300 - DNA, 24 bp, synthetic construct
  misc_feature 1..24: note = synthetic sequence
  source 1..24: mol_type = other DNA
cagttctccctgcagctgaactct

SEQ ID NO: 1301 - DNA, 22 bp, synthetic construct
  misc_feature 1..22: note = synthetic sequence
  source 1..22: mol_type = other DNA
acacctctgtcagcatggcgta

SEQ ID NO: 1302 - DNA, 22 bp, synthetic construct
  misc_feature 1..22: note = synthetic sequence
  source 1..22: mol_type = other DNA
acacctctgtcagcacggcata

SEQ ID NO: 1303 - DNA, 22 bp, synthetic construct
  misc_feature 1..22: note = synthetic sequence
  source 1..22: mol_type = other DNA
acacctctgccagcacagcata

SEQ ID NO: 1304 - DNA, 22 bp, synthetic construct
  misc_feature 1..22: note = synthetic sequence
  source 1..22: mol_type = other DNA
acacgtctgtcagcacggcgtg

SEQ ID NO: 1305 - DNA, 22 bp, synthetic construct
  misc_feature 1..22: note = synthetic sequence
  source 1..22: mol_type = other DNA
acacctctgtcagcatggcata

SEQ ID NO: 1306 - DNA, 17 bp, synthetic construct
  misc_feature 1..17: note = synthetic sequence
  modified_base 3: mod_base = OTHER; note = uracil
  modified_base 9: mod_base = OTHER; note = uracil
  source 1..17: mol_type = other DNA
catgcagctgagcagcc

SEQ ID NO: 1307 - DNA, 17 bp, synthetic construct
  misc_feature 1..17: note = synthetic sequence
  modified_base 3: mod_base = OTHER; note = uracil
  modified_base 9: mod_base = OTHER; note = uracil
  source 1..17: mol_type = other DNA
catggagctgagcaggc

SEQ ID NO: 1308 - DNA, 17 bp, synthetic construct
  misc_feature 1..17: note = synthetic sequence
  modified_base 6: mod_base = OTHER; note = uracil
  modified_base 15: mod_base = OTHER; note = uracil
  source 1..17: mol_type = other DNA
ggagctgagcagcctga

SEQ ID NO: 1309 - DNA, 17 bp, synthetic construct
  misc_feature 1..17: note = synthetic sequence
  modified_base 6: mod_base = OTHER; note = uracil
  modified_base 15: mod_base = OTHER; note = uracil
  source 1..17: mol_type = other DNA
agagctgagcagcctga

SEQ ID NO: 1310 - DNA, 17 bp, synthetic construct
  misc_feature 1..17: note = synthetic sequence
  modified_base 6: mod_base = OTHER; note = uracil
  modified_base 15: mod_base = OTHER; note = uracil
  source 1..17: mol_type = other DNA
ggagctgaggagcctga

SEQ ID NO: 1311 - DNA, 18 bp, synthetic construct
  misc_feature 1..18: note = synthetic sequence
  source 1..18: mol_type = other DNA
cacagacctgagcagcct

SEQ ID NO: 1312 - DNA, 18 bp, synthetic construct
  misc_feature 1..18: note = synthetic sequence
  modified_base 7: mod_base = OTHER; note = uracil
  modified_base 16: mod_base = OTHER; note = uracil
  source 1..18: mol_type = other DNA
tggagctaagcagcctga

SEQ ID NO: 1313 - DNA, 19 bp, synthetic construct
  misc_feature 1..19: note = synthetic sequence
  modified_base 9: mod_base = OTHER; note = uracil
  modified_base 18: mod_base = OTHER; note = uracil
  source 1..19: mol_type = other DNA
catggagctgaggagccta

SEQ ID NO: 1314 - DNA, 23 bp, synthetic construct
  misc_feature 1..23: note = synthetic sequence
  modified_base 8: mod_base = OTHER; note = uracil
  modified_base 22: mod_base = OTHER; note = uracil
  source 1..23: mol_type = other DNA
atggagctaagcagtctgagatc

SEQ ID NO: 1315 - DNA, 23 bp, synthetic construct
  misc_feature 1..23: note = synthetic sequence
  modified_base 10: mod_base = OTHER; note = uracil
  modified_base 19: mod_base = OTHER; note = uracil
  source 1..23: mol_type = other DNA
tccttaccatgaccaacatggac

SEQ ID NO: 1316 - DNA, 24 bp, synthetic construct
  misc_feature 1..24: note = synthetic sequence
  modified_base 9: mod_base = OTHER; note = uracil
  modified_base 23: mod_base = OTHER; note = uracil
  source 1..24: mol_type = other DNA
gtggtccttacaatgaccaacatg

SEQ ID NO: 1317 - DNA, 25 bp, synthetic construct
  misc_feature 1..25: note = synthetic sequence
  modified_base 12: mod_base = OTHER; note = uracil
  modified_base 21: mod_base = OTHER; note = uracil
  source 1..25: mol_type = other DNA
ggttctaacagtgatcaacatggac

SEQ ID NO: 1318 - DNA, 22 bp, synthetic construct
  misc_feature 1..22: note = synthetic sequence
  modified_base 9: mod_base = OTHER; note = uracil
  modified_base 19: mod_base = OTHER; note = uracil
  source 1..22: mol_type = other DNA
acacggcgtatctgcaaatgaa

SEQ ID NO: 1319 - DNA, 22 bp, synthetic construct
  misc_feature 1..22: note = synthetic sequence
  modified_base 8: mod_base = OTHER; note = uracil
  modified_base 18: mod_base = OTHER; note = uracil
  source 1..22: mol_type = other DNA
cacgctgtatgtccaaatgagc

SEQ ID NO: 1320 - DNA, 23 bp, synthetic construct
  misc_feature 1..23: note = synthetic sequence
  modified_base 10: mod_base = OTHER; note = uracil
  modified_base 20: mod_base = OTHER; note = uracil
  source 1..23: mol_type = other DNA
aacacgctctacctgcaaatgaa

SEQ ID NO: 1321 - DNA, 24 bp, synthetic construct
  misc_feature 1..24: note = synthetic sequence
  modified_base 5: mod_base = OTHER; note = uracil
  modified_base 15: mod_base = OTHER; note = uracil
  source 1..24: mol_type = other DNA
gaactcaccgtatctgcaaacgaa

SEQ ID NO: 1322 - DNA, 24 bp, synthetic construct
  misc_feature 1..24: note = synthetic sequence
  modified_base 9: mod_base = OTHER; note = uracil
  modified_base 21: mod_base = OTHER; note = uracil
  source 1..24: mol_type = other DNA
gaacacgctgtatgttcaaatgag

SEQ ID NO: 1323 - DNA, 24 bp, synthetic construct
  misc_feature 1..24: note = synthetic sequence
  modified_base 9: mod_base = OTHER; note = uracil
  modified_base 21: mod_base = OTHER; note = uracil
  source 1..24: mol_type = other DNA
gaacacgctgtttctgcaaatgaa

SEQ ID NO: 1324 - DNA, 24 bp, synthetic construct
  misc_feature 1..24: note = synthetic sequence
  modified_base 11: mod_base = OTHER; note = uracil
  modified_base 21: mod_base = OTHER; note = uracil
  source 1..24: mol_type = other DNA
aagcatcgcctatctgcaaatgaa

SEQ ID NO: 1325 - DNA, 24 bp, synthetic construct
  misc_feature 1..24: note = synthetic sequence
  modified_base 9: mod_base = OTHER; note = uracil
  modified_base 15: mod_base = OTHER; note = uracil
  source 1..24: mol_type = other DNA
gaacaccctgtatctgcaaacgaa

SEQ ID NO: 1326 - DNA, 25 bp, synthetic construct
  misc_feature 1..25: note = synthetic sequence
  modified_base 10: mod_base = OTHER; note = uracil
  modified_base 22: mod_base = OTHER; note = uracil
  source 1..25: mol_type = other DNA
agaacacgctgtatctgcaaatgag

SEQ ID NO: 1327 - DNA, 25 bp, synthetic construct
  misc_feature 1..25: note = synthetic sequence
  modified_base 6: mod_base = OTHER; note = uracil
  modified_base 16: mod_base = OTHER; note = uracil
  source 1..25: mol_type = other DNA
ggaactccctgtatctgcaaaagaa

SEQ ID NO: 1328 - DNA, 25 bp, synthetic construct
  misc_feature 1..25: note = synthetic sequence
  modified_base 6: mod_base = OTHER; note = uracil
  modified_base 16: mod_base = OTHER; note = uracil
  source 1..25: mol_type = other DNA
gcaagtccctgtatctgcaaaagaa

SEQ ID NO: 1329 - DNA, 25 bp, synthetic construct
  misc_feature 1..25: note = synthetic sequence
  modified_base 9: mod_base = OTHER; note = uracil
  modified_base 21: mod_base = OTHER; note = uracil
  source 1..25: mol_type = other DNA
gaacacgctgcatcttcaaatgaac

SEQ ID NO: 1330 - DNA, 25 bp, synthetic construct
  misc_feature 1..25: note = synthetic sequence
  modified_base 9: mod_base = OTHER; note = uracil
  modified_base 21: mod_base = OTHER; note = uracil
  source 1..25: mol_type = other DNA
gaactcactccgtttgcaaatgaac

SEQ ID NO: 1331 - DNA, 25 bp, synthetic construct
  misc_feature 1..25: note = synthetic sequence
  modified_base 9: mod_base = OTHER; note = uracil
  modified_base 21: mod_base = OTHER; note = uracil
  source 1..25: mol_type = other DNA
gaacacgctgtatctgcaaatgaac

SEQ ID NO: 1332 - DNA, 26 bp, synthetic construct
  misc_feature 1..26: note = synthetic sequence
  modified_base 11: mod_base = OTHER; note = uracil
  modified_base 23: mod_base = OTHER; note = uracil
  source 1..26: mol_type = other DNA
aagaacacgctgtatcttcaaatggg

SEQ ID NO: 1333 - DNA, 26 bp, synthetic construct
  misc_feature 1..26: note = synthetic sequence
  modified_base 11: mod_base = OTHER; note = uracil
  modified_base 23: mod_base = OTHER; note = uracil
  source 1..26: mol_type = other DNA
aagaactccctctatctgcaagtgaa

SEQ ID NO: 1334 - DNA, 26 bp, synthetic construct
  misc_feature 1..26: note = synthetic sequence
  modified_base 11: mod_base = OTHER; note = uracil
  modified_base 23: mod_base = OTHER; note = uracil
  source 1..26: mol_type = other DNA
aagaacaggctgtatctgcaaatgaa

SEQ ID NO: 1335 - DNA, 27 bp, synthetic construct
  misc_feature 1..27: note = synthetic sequence
  modified_base 12: mod_base = OTHER; note = uracil
  modified_base 24: mod_base = OTHER; note = uracil
  source 1..27: mol_type = other DNA
caaaaactccctgtatctgcaaatgaa

SEQ ID NO: 1336 - DNA, 27 bp, synthetic construct
  misc_feature 1..27: note = synthetic sequence
  modified_base 8: mod_base = OTHER; note = uracil
  modified_base 18: mod_base = OTHER; note = uracil
  source 1..27: mol_type = other DNA
taagaactcaccgtatctccaaacgaa

SEQ ID NO: 1337 - DNA, 27 bp, synthetic construct
  misc_feature 1..27: note = synthetic sequence
  modified_base 12: mod_base = OTHER; note = uracil
  modified_base 24: mod_base = OTHER; note = uracil
  source 1..27: mol_type = other DNA
ccagaattcactgtctctgcaaatgaa

SEQ ID NO: 1338 - DNA, 27 bp, synthetic construct
  misc_feature 1..27: note = synthetic sequence
  modified_base 12: mod_base = OTHER; note = uracil
  modified_base 24: mod_base = OTHER; note = uracil
  source 1..27: mol_type = other DNA
caggaacttcctgtatcagcaaatgaa

SEQ ID NO: 1339 - DNA, 27 bp, synthetic construct
  misc_feature 1..27: note = synthetic sequence
  modified_base 12: mod_base = OTHER; note = uracil
  modified_base 24: mod_base = OTHER; note = uracil
  source 1..27: mol_type = other DNA
caagaacacgctgtatcttcaaatgag

SEQ ID NO: 1340 - DNA, 27 bp, synthetic construct
  misc_feature 1..27: note = synthetic sequence
  modified_base 12: mod_base = OTHER; note = uracil
  modified_base 24: mod_base = OTHER; note = uracil
  source 1..27: mol_type = other DNA
caagaactccctgtatctgcaaatgaa

SEQ ID NO: 1341 - DNA, 27 bp, synthetic construct
  misc_feature 1..27: note = synthetic sequence
  modified_base 12: mod_base = OTHER; note = uracil
  modified_base 24: mod_base = OTHER; note = uracil
  source 1..27: mol_type = other DNA
caagaactcactctgtttgcaaatgaa

SEQ ID NO: 1342 - DNA, 28 bp, synthetic construct
  misc_feature 1..28: note = synthetic sequence
  modified_base 13: mod_base = OTHER; note = uracil
  modified_base 25: mod_base = OTHER; note = uracil
  source 1..28: mol_type = other DNA
caaaaaacacgctgtatctgcaaatgat

SEQ ID NO: 1343 - DNA, 28 bp, synthetic construct
  misc_feature 1..28: note = synthetic sequence
  modified_base 13: mod_base = OTHER; note = uracil
  modified_base 25: mod_base = OTHER; note = uracil
  source 1..28: mol_type = other DNA
caaagaacacgatgtatctgcaaatgag

SEQ ID NO: 1344 - DNA, 28 bp, synthetic construct
  misc_feature 1..28: note = synthetic sequence
  modified_base 12: mod_base = OTHER; note = uracil
  modified_base 24: mod_base = OTHER; note = uracil
  source 1..28: mol_type = other DNA
caagaactcactgtatctgcaaatgaac

SEQ ID NO: 1345 - DNA, 28 bp, synthetic construct
  misc_feature 1..28: note = synthetic sequence
  modified_base 13: mod_base = OTHER; note = uracil
  modified_base 25: mod_base = OTHER; note = uracil
  source 1..28: mol_type = other DNA
ccaagaactcactgtatttgctaatgaa

SEQ ID NO: 1346 - DNA, 28 bp, synthetic construct
  misc_feature 1..28: note = synthetic sequence
  modified_base 13: mod_base = OTHER; note = uracil
  modified_base 25: mod_base = OTHER; note = uracil
  source 1..28: mol_type = other DNA
ccaagaactcactgtatttgcaaatgaa

SEQ ID NO: 1347 - DNA, 28 bp, synthetic construct
  misc_feature 1..28: note = synthetic sequence
  modified_base 15: mod_base = OTHER; note = uracil
  modified_base 25: mod_base = OTHER; note = uracil
  source 1..28: mol_type = other DNA
ccaataactcaccgtatctgcaaatgaa

SEQ ID NO: 1348 - DNA, 28 bp, synthetic construct
  misc_feature 1..28: note = synthetic sequence
  modified_base 13: mod_base = OTHER; note = uracil
  modified_base 25: mod_base = OTHER; note = uracil
  source 1..28: mol_type = other DNA
caaaaaacacgctgtatctgcaaatgaa

SEQ ID NO: 1349 - DNA, 28 bp, synthetic construct
  misc_feature 1..28: note = synthetic sequence
  modified_base 12: mod_base = OTHER; note = uracil
  modified_base 24: mod_base = OTHER; note = uracil
  source 1..28: mol_type = other DNA
caagaacacgctgtatcttcaaatgaac

SEQ ID NO: 1350 - DNA, 28 bp, synthetic construct
  misc_feature 1..28: note = synthetic sequence
  modified_base 14: mod_base = OTHER; note = uracil
  modified_base 24: mod_base = OTHER; note = uracil
  source 1..28: mol_type = other DNA
caaaagcatcacctatctgcaaatgaac

SEQ ID NO: 1351 - DNA, 28 bp, synthetic construct
  misc_feature 1..28: note = synthetic sequence
  modified_base 12: mod_base = OTHER; note = uracil
  modified_base 24: mod_base = OTHER; note = uracil
  source 1..28: mol_type = other DNA
caagaacacacttcatctgcaaatgaac

SEQ ID NO: 1352 - DNA, 28 bp, synthetic construct
  misc_feature 1..28: note = synthetic sequence
  modified_base 14: mod_base = OTHER; note = uracil
  modified_base 24: mod_base = OTHER; note = uracil
  source 1..28: mol_type = other DNA
caaaagcatcacctatctgcaaatgaag

SEQ ID NO: 1353 - DNA, 29 bp, synthetic construct
  misc_feature 1..29: note = synthetic sequence
  modified_base 14: mod_base = OTHER; note = uracil
  modified_base 26: mod_base = OTHER; note = uracil
  source 1..29: mol_type = other DNA
tcaaagaactcactgtatctgcaaatgaa

SEQ ID NO: 1354 - DNA, 29 bp, synthetic construct
  misc_feature 1..29: note = synthetic sequence
  modified_base 12: mod_base = OTHER; note = uracil
  modified_base 26: mod_base = OTHER; note = uracil
  source 1..29: mol_type = other DNA
gctaagaactctctgtatctgcaaatgaa

SEQ ID NO: 1355 - DNA, 29 bp, synthetic construct
  misc_feature 1..29: note = synthetic sequence
  modified_base 12: mod_base = OTHER; note = uracil
  modified_base 25: mod_base = OTHER; note = uracil
  source 1..29: mol_type = other DNA
ccaagaactccttgtatcttcaaatgaac

SEQ ID NO: 1356 - DNA, 29 bp, synthetic construct
  misc_feature 1..29: note = synthetic sequence
  modified_base 12: mod_base = OTHER; note = uracil
  modified_base 25: mod_base = OTHER; note = uracil
  source 1..29: mol_type = other DNA
ccaagaagtccttgtatcttcaaatgaac

SEQ ID NO: 1357 - DNA, 30 bp, synthetic construct; identical to SEQ ID NO: 1214
  misc_feature 1..30: note = synthetic sequence
  modified_base 13: mod_base = OTHER; note = uracil
  modified_base 26: mod_base = OTHER; note = uracil
  source 1..30: mol_type = other DNA

SEQ ID NO: 1358 - DNA, 19 bp, synthetic construct
  misc_feature 1..19: note = synthetic sequence
  modified_base 11: mod_base = OTHER; note = uracil
  modified_base 17: mod_base = OTHER; note = uracil
  source 1..19: mol_type = other DNA
cagttccccctgaagctga

SEQ ID NO: 1359 - DNA, 20 bp, synthetic construct
  misc_feature 1..20: note = synthetic sequence
  modified_base 7: mod_base = OTHER; note = uracil
  modified_base 17: mod_base = OTHER; note = uracil
  source 1..20: mol_type = other DNA
cagttctccctgaagctggg

SEQ ID NO: 1360 - DNA, 20 bp, synthetic construct
  misc_feature 1..20: note = synthetic sequence
  modified_base 4: mod_base = OTHER; note = uracil
  modified_base 11: mod_base = OTHER; note = uracil
  source 1..20: mol_type = other DNA
cagttctccctgaagccgag

SEQ ID NO: 1361 - DNA, 21 bp, synthetic construct
  misc_feature 1..21: note = synthetic sequence
  modified_base 8: mod_base = OTHER; note = uracil
  modified_base 18: mod_base = OTHER; note = uracil
  source 1..21: mol_type = other DNA
ccagttctccctgaagctgag

SEQ ID NO: 1362 - DNA, 22 bp, synthetic construct
  misc_feature 1..22: note = synthetic sequence
  modified_base 10: mod_base = OTHER; note = uracil
  modified_base 20: mod_base = OTHER; note = uracil
  source 1..22: mol_type = other DNA
aaccagttctccctgaacctga

SEQ ID NO: 1363 - DNA, 22 bp, synthetic construct
  misc_feature 1..22: note = synthetic sequence
  modified_base 10: mod_base = OTHER; note = uracil
  modified_base 20: mod_base = OTHER; note = uracil
  source 1..22: mol_type = other DNA
aaccacttctccctgaagctga

SEQ ID NO: 1364 - DNA, 23 bp, synthetic construct
  misc_feature 1..23: note = synthetic sequence
  modified_base 11: mod_base = OTHER; note = uracil
  modified_base 21: mod_base = OTHER; note = uracil
  source 1..23: mol_type = other DNA
gaaccaattctccctgaagctga

SEQ ID NO: 1365 - DNA, 24 bp, synthetic construct
  misc_feature 1..24: note = synthetic sequence
  modified_base 12: mod_base = OTHER; note = uracil
  modified_base 22: mod_base = OTHER; note = uracil
  source 1..24: mol_type = other DNA
agaaccagttctacctgaagctga

SEQ ID NO: 1366 - DNA, 24 bp, synthetic construct
  misc_feature 1..24: note = synthetic sequence
  modified_base 12: mod_base = OTHER; note = uracil
  modified_base 22: mod_base = OTHER; note = uracil
  source 1..24: mol_type = other DNA
agaagcagttctacctgaagctga

SEQ ID NO: 1367 - DNA, 17 bp, synthetic construct
  misc_feature 1..17: note = synthetic sequence
  modified_base 5: mod_base = OTHER; note = uracil
  modified_base 15: mod_base = OTHER; note = uracil
  source 1..17: mol_type = other DNA
gcagtggagcagcctga

SEQ ID NO: 1368 - DNA, 19 bp, synthetic construct
  misc_feature 1..19: note = synthetic sequence
  modified_base 7: mod_base = OTHER; note = uracil
  modified_base 17: mod_base = OTHER; note = uracil
  source 1..19: mol_type = other DNA
cagttctccctgcagctga

SEQ ID NO: 1369 - DNA, 21 bp, synthetic construct
  misc_feature 1..21: note = synthetic sequence
  modified_base 10: mod_base = OTHER; note = uracil
  modified_base 19: mod_base = OTHER; note = uracil
  source 1..21: mol_type = other DNA
atctgcagatcagcacgctaa

SEQ ID NO: 1370 - DNA, 22 bp, synthetic construct
  misc_feature 1..22: note = synthetic sequence
  modified_base 11: mod_base = OTHER; note = uracil
  modified_base 20: mod_base = OTHER; note = uracil
  source 1..22: mol_type = other DNA
tatctgcagatcagcagcctaa

SEQ ID NO: 1371 - DNA, 22 bp, synthetic construct
  misc_feature 1..22: note = synthetic sequence
  modified_base 11: mod_base = OTHER; note = uracil
  modified_base 20: mod_base = OTHER; note = uracil
  source 1..22: mol_type = other DNA
tgtcttcagatcagcagcctaa

SEQ ID NO: 1372 - DNA, 22 bp, synthetic construct
  misc_feature 1..22: note = synthetic sequence
  modified_base 11: mod_base = OTHER; note = uracil
  modified_base 20: mod_base = OTHER; note = uracil
  source 1..22: mol_type = other DNA
tacctgcagatcagcagcctaa

SEQ ID NO: 1373 - DNA, 22 bp, synthetic construct
  misc_feature 1..22: note = synthetic sequence
  modified_base 11: mod_base = OTHER; note = uracil
  modified_base 20: mod_base = OTHER; note = uracil
  source 1..22: mol_type = other DNA
tatctgcagatctgcagcctaa

SEQ ID NO: 1374 - DNA, 25 bp, synthetic construct
  misc_feature 1..25: note = synthetic sequence
  modified_base 7: mod_base = OTHER; note = uracil
  modified_base 23: mod_base = OTHER; note = uracil
  source 1..25: mol_type = other DNA
tggagctgagcagcctgagatctga

SEQ ID NO: 1375 - DNA, 25 bp, synthetic construct
  misc_feature 1..25: note = synthetic sequence
  modified_base 13: mod_base = OTHER; note = uracil
  modified_base 22: mod_base = OTHER; note = uracil
  source 1..25: mol_type = other DNA
caatgaccaacatggaccctgtgga

SEQ ID NO: 1376 - DNA, 25 bp, synthetic construct
  misc_feature 1..25: note = synthetic sequence
  modified_base 9: mod_base = OTHER; note = uracil
  modified_base 18: mod_base = OTHER; note = uracil
  source 1..25: mol_type = other DNA
tctgcaaatgaacagcctgagagcc

SEQ ID NO: 1377 - DNA, 25 bp, synthetic construct
  misc_feature 1..25: note = synthetic sequence
  modified_base 5: mod_base = OTHER; note = uracil
  modified_base 9: mod_base = OTHER; note = uracil
  source 1..25: mol_type = other DNA
gagctctgtgaccgccgcggacacg

SEQ ID NO: 1378 - DNA, 25 bp, synthetic construct
  misc_feature 1..25: note = synthetic sequence
  modified_base 11: mod_base = OTHER; note = uracil
  modified_base 20: mod_base = OTHER; note = uracil
  source 1..25: mol_type = other DNA
cagcaccgcctacctgcagtggagc

SEQ ID NO: 1379 - DNA, 25 bp, synthetic construct
  misc_feature 1..25: note = synthetic sequence
  modified_base 9: mod_base = OTHER; note = uracil
  modified_base 24: mod_base = OTHER; note = uracil
  source 1..25: mol_type = other DNA
gttctccctgcagctgaactctgtg

SEQ ID NO: 1380 - DNA, 24 bp, synthetic construct
  misc_feature 1..24: note = synthetic sequence
  modified_base 11: mod_base = OTHER; note = uracil
  modified_base 21: mod_base = OTHER; note = uracil
  source 1..24: mol_type = other DNA
cagcacggcatatctgcagatcag

SEQ ID NO: 1381 - DNA, 22 bp, synthetic construct
  misc_feature 1..22: note = synthetic sequence
  modified_base 8: mod_base = OTHER; note = uracil
  modified_base 18: mod_base = OTHER; note = uracil
  source 1..22: mol_type = other DNA
cacagtctacatggagctgagc

SEQ ID NO: 1382 - DNA, 22 bp, synthetic construct
  misc_feature 1..22: note = synthetic sequence
  modified_base 8: mod_base = OTHER; note = uracil
  modified_base 18: mod_base = OTHER; note = uracil
  source 1..22: mol_type = other DNA
cacagcctacatgcagctgagc

SEQ ID NO: 1383 - DNA, 22 bp, synthetic construct
  misc_feature 1..22: note = synthetic sequence
  modified_base 8: mod_base = OTHER; note = uracil
  modified_base 18: mod_base = OTHER; note = uracil
  source 1..22: mol_type = other DNA
cacagcctacacggagctgagc

SEQ ID NO: 1384 - DNA, 22 bp, synthetic construct
  misc_feature 1..22: note = synthetic sequence
  modified_base 8: mod_base = OTHER; note = uracil
  modified_base 18: mod_base = OTHER; note = uracil
  source 1..22: mol_type = other DNA
cacagcctacatggagctgagg

SEQ ID NO: 1385 - DNA, 22 bp, synthetic construct
  misc_feature 1..22: note = synthetic sequence
  modified_base 8: mod_base = OTHER; note = uracil
  modified_base 18: mod_base = OTHER; note = uracil
  source 1..22: mol_type = other DNA
cacagcctacacagacctgagc

SEQ ID NO: 1386 - DNA, 22 bp, synthetic construct
  misc_feature 1..22: note = synthetic sequence
  modified_base 8: mod_base = OTHER; note = uracil
  modified_base 18: mod_base = OTHER; note = uracil
  source 1..22: mol_type = other DNA
cacagcctgcacggagctgagc

SEQ ID NO: 1387 - DNA, 22 bp, synthetic construct
  misc_feature 1..22: note = synthetic sequence
  modified_base 8: mod_base = OTHER; note = uracil
  modified_base 18: mod_base = OTHER; note = uracil
  source 1..22: mol_type = other DNA
cacagcctacatggagctaagc

SEQ ID NO: 1388 - DNA, 22 bp, synthetic construct
  misc_feature 1..22: note = synthetic sequence
  modified_base 8: mod_base = OTHER; note = uracil
  modified_base 18: mod_base = OTHER; note = uracil
  source 1..22: mol_type = other DNA
cacagcctacatggagctgagc

SEQ ID NO: 1389 - DNA, 22 bp, synthetic construct
  misc_feature 1..22: note = synthetic sequence
  modified_base 8: mod_base = OTHER; note = uracil
  modified_base 18: mod_base = OTHER; note = uracil
  source 1..22: mol_type = other DNA
gacagcctacatagagctgagc

SEQ ID NO: 1390 - DNA, 26 bp, synthetic construct
  misc_feature 1..26: note = synthetic sequence
  modified_base 12: mod_base = OTHER; note = uracil
  modified_base 24: mod_base = OTHER; note = uracil
  source 1..26: mol_type = other DNA
caagaatgaagtggttctaacagtga

SEQ ID NO: 1391 - DNA, 26 bp, synthetic construct
  misc_feature 1..26: note = synthetic sequence
  modified_base 12: mod_base = OTHER; note = uracil
  modified_base 24: mod_base = OTHER; note = uracil
  source 1..26: mol_type = other DNA
caaaaaccaggtggtccttacaatga

SEQ ID NO: 1392 - DNA, 26 bp, synthetic construct
  misc_feature 1..26: note = synthetic sequence
  modified_base 12: mod_base = OTHER; note = uracil
  modified_base 24: mod_base = OTHER; note = uracil
  source 1..26: mol_type = other DNA
caaaagccaggtggtccttaccatga

SEQ ID NO: 1393 - DNA, 27 bp, synthetic construct
  misc_feature 1..27: note = synthetic sequence
  modified_base 10: mod_base = OTHER; note = uracil
  modified_base 20: mod_base = OTHER; note = uracil
  source 1..27: mol_type = other DNA
aacacgctctacctgcaaatgaacagc

SEQ ID NO: 1394 - DNA, 27 bp, synthetic construct
  misc_feature 1..27: note = synthetic sequence
  modified_base 10: mod_base = OTHER; note = uracil
  modified_base 20: mod_base = OTHER; note = uracil
  source 1..27: mol_type = other DNA
aagtccttgtatcttcaaatgaacagc

SEQ ID NO: 1395 - DNA, 27 bp, synthetic construct
  misc_feature 1..27: note = synthetic sequence
  modified_base 4: mod_base = OTHER; note = uracil
  modified_base 14: mod_base = OTHER; note = uracil
  source 1..27: mol_type = other DNA
aagtccctgtatctgcaaaagaacaga

SEQ ID NO: 1396 - DNA, 27 bp, synthetic construct
  misc_feature 1..27: note = synthetic sequence
  modified_base 10: mod_base = OTHER; note = uracil
  modified_base 20: mod_base = OTHER; note = uracil
  source 1..27: mol_type = other DNA
aacacgctgtatctgcaaatgaacagc

SEQ ID NO: 1397 - DNA, 27 bp, synthetic construct
  misc_feature 1..27: note = synthetic sequence
  modified_base 4: mod_base = OTHER; note = uracil
  modified_base 14: mod_base = OTHER; note = uracil
  source 1..27: mol_type = other DNA
aactccctgtatctgcaaaagaacaga

SEQ ID NO: 1398 - DNA, 27 bp, synthetic construct
  misc_feature 1..27: note = synthetic sequence
  modified_base 10: mod_base = OTHER; note = uracil
  modified_base 20: mod_base = OTHER; note = uracil
  source 1..27: mol_type = other DNA
aactctctgtatctgcaaatgaacact

SEQ ID NO: 1399 - DNA, 27 bp, synthetic construct
  misc_feature 1..27: note = synthetic sequence
  modified_base 10: mod_base = OTHER; note = uracil
  modified_base 20: mod_base = OTHER; note = uracil
  source 1..27: mol_type = other DNA
aattcactgtctctgcaaatgaacagc

SEQ ID NO: 1400 - DNA, 27 bp, synthetic construct
  misc_feature 1..27: note = synthetic sequence
  modified_base 10: mod_base = OTHER; note = uracil
  modified_base 20: mod_base = OTHER; note = uracil
  source 1..27: mol_type = other DNA
aactcactgtatttgcaaatgaacagt

SEQ ID NO: 1401 - DNA, 27 bp, synthetic construct
  misc_feature 1..27: note = synthetic sequence
  modified_base 4: mod_base = OTHER; note = uracil
  modified_base 14: mod_base = OTHER; note = uracil
  source 1..27: mol_type = other DNA
aactcaccgtatctgcaaacgaacagt

SEQ ID NO: 1402 - DNA, 27 bp, synthetic construct
  misc_feature 1..27: note = synthetic sequence
  modified_base 8: mod_base = OTHER; note = uracil
  modified_base 20: mod_base = OTHER; note = uracil
  source 1..27: mol_type = other DNA
aacacgctgtatgttcaaatgagcagt

SEQ ID NO: 1403 - DNA, 27 bp, synthetic construct
  misc_feature 1..27: note = synthetic sequence
  modified_base 10: mod_base = OTHER; note = uracil
  modified_base 20: mod_base = OTHER; note = uracil
  source 1..27: mol_type = other DNA
aactcactctgtttgcaaatgaacagt

SEQ ID NO: 1404 - DNA, 27 bp, synthetic construct
  misc_feature 1..27: note = synthetic sequence
  modified_base 8: mod_base = OTHER; note = uracil
  modified_base 20: mod_base = OTHER; note = uracil
  source 1..27: mol_type = other DNA
aacacgctgcatcttcaaatgaacagc

SEQ ID NO: 1405 - DNA, 27 bp, synthetic construct
  misc_feature 1..27: note = synthetic sequence
  modified_base 10: mod_base = OTHER; note = uracil
  modified_base 20: mod_base = OTHER; note = uracil
  source 1..27: mol_type = other DNA
aagtccttgtatcttcatatgaacagc

SEQ ID NO: 1406 - DNA, 27 bp, synthetic construct
  misc_feature 1..27: note = synthetic sequence
  modified_base 10: mod_base = OTHER; note = uracil
  modified_base 23: mod_base = OTHER; note = uracil
  source 1..27: mol_type = other DNA
aacacgctgtatctgcaaatgatcagc

SEQ ID NO: 1407 - DNA, 27 bp, synthetic construct
  misc_feature 1..27: note = synthetic sequence
  modified_base 8: mod_base = OTHER; note = uracil
  modified_base 20: mod_base = OTHER; note = uracil
  source 1..27: mol_type = other DNA
aactcactccgtttgcaaatgaacagt

SEQ ID NO: 1408 - DNA, 27 bp, synthetic construct
  misc_feature 1..27: note = synthetic sequence
  modified_base 10: mod_base = OTHER; note = uracil
  modified_base 20: mod_base = OTHER; note = uracil
  source 1..27: mol_type = other DNA
aacacgctgtttctgcaaatgaacagc

SEQ ID NO: 1409 - DNA, 27 bp, synthetic construct
  misc_feature 1..27: note = synthetic sequence
  modified_base 10: mod_base = OTHER; note = uracil
  modified_base 20: mod_base = OTHER; note = uracil
  source 1..27: mol_type = other DNA
aactccttgtatcttcaaatgaacagc

SEQ ID NO: 1410 - DNA, 27 bp, synthetic construct
  misc_feature 1..27: note = synthetic sequence
  modified_base 10: mod_base = OTHER; note = uracil
  modified_base 20: mod_base = OTHER; note = uracil
  source 1..27: mol_type = other DNA
aacttcctgtatcagcaaatgaacagc

SEQ ID NO: 1411 - DNA, 27 bp, synthetic construct
  misc_feature 1..27: note = synthetic sequence
  modified_base 8: mod_base = OTHER; note = uracil
  modified_base 20: mod_base = OTHER; note = uracil
  source 1..27: mol_type = other DNA
aacacgctgtatcttcaaatgaacagc

SEQ ID NO: 1412 - DNA, 27 bp, synthetic construct
  misc_feature 1..27: note = synthetic sequence
  modified_base 10: mod_base = OTHER; note = uracil
  modified_base 20: mod_base = OTHER; note = uracil
  source 1..27: mol_type = other DNA
aactcaccgtatctgcaaatgaacagc

SEQ ID NO: 1413 - DNA, 27 bp, synthetic construct
  misc_feature 1..27: note = synthetic sequence
  modified_base 10: mod_base = OTHER; note = uracil
  modified_base 20: mod_base = OTHER; note = uracil
  source 1..27: mol_type = other DNA
aactcactgtatctgcaaatgaacagc

SEQ ID NO: 1414 - DNA, 27 bp, synthetic construct
  misc_feature 1..27: note = synthetic sequence
  modified_base 10: mod_base = OTHER; note = uracil
  modified_base 20: mod_base = OTHER; note = uracil
  source 1..27: mol_type = other DNA
aacacgatgtatctgcaaatgagcaac

SEQ ID NO: 1415 - DNA, 27 bp, synthetic construct
  misc_feature 1..27: note = synthetic sequence
  modified_base 10: mod_base = OTHER; note = uracil
  modified_base 20: mod_base = OTHER; note = uracil
  source 1..27: mol_type = other DNA
agcatcacctatctgcaaatgaacagc

SEQ ID NO: 1416 - DNA, 27 bp, synthetic construct
  misc_feature 1..27: note = synthetic sequence
  modified_base 8: mod_base = OTHER; note = uracil
  modified_base 20: mod_base = OTHER; note = uracil
  source 1..27: mol_type = other DNA
aacacgctgtatcttcaaatgagcagt

SEQ ID NO: 1417 - DNA, 27 bp, synthetic construct
  misc_feature 1..27: note = synthetic sequence
  modified_base 10: mod_base = OTHER; note = uracil
  modified_base 20: mod_base = OTHER; note = uracil
  source 1..27: mol_type = other DNA
aactctctgtatctgcaaatgaacagt

SEQ ID NO: 1418 - DNA, 27 bp, synthetic construct
  misc_feature 1..27: note = synthetic sequence
  modified_base 10: mod_base = OTHER; note = uracil
  modified_base 20: mod_base = OTHER; note = uracil
  source 1..27: mol_type = other DNA
aacacgctgtatgtccaaatgagcagt

SEQ ID NO: 1419 - DNA, 27 bp, synthetic construct
  misc_feature 1..27: note = synthetic sequence
  modified_base 10: mod_base = OTHER; note = uracil
  modified_base 20: mod_base = OTHER; note = uracil
  source 1..27: mol_type = other DNA
aacacggcgtatctgcaaatgaacagc

SEQ ID NO: 1420 - DNA, 27 bp, synthetic construct
  misc_feature 1..27: note = synthetic sequence
  modified_base 10: mod_base = OTHER; note = uracil
  modified_base 20: mod_base = OTHER; note = uracil
  source 1..27: mol_type = other DNA
agcatcacctatctgcaaatgaagagc

SEQ ID NO: 1421 - DNA, 27 bp, synthetic construct
  misc_feature 1..27: note = synthetic sequence
  modified_base 8: mod_base = OTHER; note = uracil
  modified_base 20: mod_base = OTHER; note = uracil
  source 1..27: mol_type = other DNA
aacacgctgtatcttcaaatgaacaac

SEQ ID NO: 1422 - DNA, 27 bp, synthetic construct
  misc_feature 1..27: note = synthetic sequence
  modified_base 10: mod_base = OTHER; note = uracil
  modified_base 20: mod_base = OTHER; note = uracil
  source 1..27: mol_type = other DNA
aacacgctgtatctgcaaatgaacagt

SEQ ID NO: 1423 - DNA, 27 bp, synthetic construct
  misc_feature 1..27: note = synthetic sequence
  modified_base 10: mod_base = OTHER; note = uracil
  modified_base 20: mod_base = OTHER; note = uracil
  source 1..27: mol_type = other DNA
aactccctctatctgcaagtgaacagc

SEQ ID NO: 1424 - DNA, 27 bp, synthetic construct
  misc_feature 1..27: note = synthetic sequence
  modified_base 10: mod_base = OTHER; note = uracil
  modified_base 20: mod_base = OTHER; note = uracil
  source 1..27: mol_type = other DNA
aactccctgtatctgcaaatgaacagt

SEQ ID NO: 1425 - DNA, 27 bp, synthetic construct
  misc_feature 1..27: note = synthetic sequence
  modified_base 10: mod_base = OTHER; note = uracil
  modified_base 20: mod_base = OTHER; note = uracil
  source 1..27: mol_type = other DNA
agcatcgcctatctgcaaatgaacagc

SEQ ID NO: 1426 - DNA, 27 bp, synthetic construct
  misc_feature 1..27: note = synthetic sequence
  modified_base 10: mod_base = OTHER; note = uracil
  modified_base 20: mod_base = OTHER; note = uracil
  source 1..27: mol_type = other DNA
aacacgctgtatctgcaaatgagcaac

SEQ ID NO: 1427 - DNA, 27 bp, synthetic construct
  misc_feature 1..27: note = synthetic sequence
  modified_base 12: mod_base = OTHER; note = uracil
  modified_base 24: mod_base = OTHER; note = uracil
  source 1..27: mol_type = other DNA
aacaccctgtatctgcaaacgaatagc

SEQ ID NO: 1428 - DNA, 27 bp, synthetic construct
  misc_feature 1..27: note = synthetic sequence
  modified_base 9: mod_base = OTHER; note = uracil
  modified_base 20: mod_base = OTHER; note = uracil
  source 1..27: mol_type = other DNA
aacacacttcatctgcaaatgaacagc

SEQ ID NO: 1429 - DNA, 27 bp, synthetic construct
  misc_feature 1..27: note = synthetic sequence
  modified_base 10: mod_base = OTHER; note = uracil
  modified_base 20: mod_base = OTHER; note = uracil
  source 1..27: mol_type = other DNA
aacaggctgtatctgcaaatgaacagc

SEQ ID NO: 1430 - DNA, 27 bp, synthetic construct
  misc_feature 1..27: note = synthetic sequence
  modified_base 4: mod_base = OTHER; note = uracil
  modified_base 14: mod_base = OTHER; note = uracil
  source 1..27: mol_type = other DNA
aactcaccgtatctccaaacgaacagt

SEQ ID NO: 1431 - DNA, 27 bp, synthetic construct
  misc_feature 1..27: note = synthetic sequence
  modified_base 8: mod_base = OTHER; note = uracil
  modified_base 20: mod_base = OTHER; note = uracil
  source 1..27: mol_type = other DNA
aacacgctgtatcttcaaatgggcagc

SEQ ID NO: 1432 - DNA, 27 bp, synthetic construct
  misc_feature 1..27: note = synthetic sequence
  modified_base 10: mod_base = OTHER; note = uracil
  modified_base 20: mod_base = OTHER; note = uracil
  source 1..27: mol_type = other DNA
aactcactgtatttgctaatgaacagt

SEQ ID NO: 1433 - DNA, 27 bp, synthetic construct
  misc_feature 1..27: note = synthetic sequence
  modified_base 10: mod_base = OTHER; note = uracil
  modified_base 20: mod_base = OTHER; note = uracil
  source 1..27: mol_type = other DNA
aacacgctgtatctgcaaatgagcagc

SEQ ID NO: 1434 - DNA, 23 bp, synthetic construct
  misc_feature 1..23: note = synthetic sequence
  modified_base 9: mod_base = OTHER; note = uracil
  modified_base 22: mod_base = OTHER; note = uracil
  source 1..23: mol_type = other DNA
cctgaagctgagctctgtgactg

SEQ ID NO: 1435 - DNA, 23 bp, synthetic construct
  misc_feature 1..23: note = synthetic sequence
  modified_base 14: mod_base = OTHER; note = uracil
  modified_base 22: mod_base = OTHER; note = uracil
  source 1..23: mol_type = other DNA
cctgaagccgagctctgtgactg

SEQ ID NO: 1436 - DNA, 23 bp, synthetic construct
  misc_feature 1..23: note = synthetic sequence
  modified_base 9: mod_base = OTHER; note = uracil
  modified_base 18: mod_base = OTHER; note = uracil
  source 1..23: mol_type = other DNA
cctgaacctgagctctgtgaccg

SEQ ID NO: 1437 - DNA, 23 bp, synthetic construct
  misc_feature 1..23: note = synthetic sequence
  modified_base 9: mod_base = OTHER; note = uracil
  modified_base 18: mod_base = OTHER; note = uracil
  source 1..23: mol_type = other DNA
cctgaagctgagctctgtgaccg

SEQ ID NO: 1438 - DNA, 23 bp, synthetic construct
  misc_feature 1..23: note = synthetic sequence
  modified_base 9: mod_base = OTHER; note = uracil
  modified_base 18: mod_base = OTHER; note = uracil
  source 1..23: mol_type = other DNA
cctgaagctgggctctgtgaccg

SEQ ID NO: 1439 - DNA, 25 bp, synthetic construct
  misc_feature 1..25: note = synthetic sequence
  modified_base 11: mod_base = OTHER; note = uracil
  modified_base 22: mod_base = OTHER; note = uracil
  source 1..25: mol_type = other DNA
gacaagtccatcagcaccgcctacc

SEQ ID NO: 1440 - DNA, 25 bp, synthetic construct
  misc_feature 1..25: note = synthetic sequence
  modified_base 7: mod_base = OTHER; note = uracil
  modified_base 22: mod_base = OTHER; note = uracil
  source 1..25: mol_type = other DNA
gacagctccagcagcaccgcctacc

SEQ ID NO: 1441 - DNA, 25 bp, synthetic construct
  misc_feature 1..25: note = synthetic sequence
  modified_base 11: mod_base = OTHER; note = uracil
  modified_base 22: mod_base = OTHER; note = uracil
  source 1..25: mol_type = other DNA
gacaagcccatcagcaccgcctacc

SEQ ID NO: 1442 - DNA, 25 bp, synthetic construct
  misc_feature 1..25: note = synthetic sequence
  modified_base 11: mod_base = OTHER; note = uracil
  modified_base 22: mod_base = OTHER; note = uracil
  source 1..25: mol_type = other DNA
gacaagtccatcagcactgcctacc

SEQ ID NO: 1443 - DNA, 24 bp, synthetic construct
  misc_feature 1..24: note = synthetic sequence
  modified_base 11: mod_base = OTHER; note = uracil
  modified_base 22: mod_base = OTHER; note = uracil
  source 1..24: mol_type = other DNA
cagttctccctgcagctgaactct

SEQ ID NO: 1444 - DNA, 22 bp, synthetic construct
  misc_feature 1..22: note = synthetic sequence
  modified_base 10: mod_base = OTHER; note = uracil
  modified_base 21: mod_base = OTHER; note = uracil
  source 1..22: mol_type = other DNA
acacctctgtcagcatggcgta

SEQ ID NO: 1445 - DNA, 22 bp, synthetic construct
  misc_feature 1..22: note = synthetic sequence
  modified_base 10: mod_base = OTHER; note = uracil
  modified_base 21: mod_base = OTHER; note = uracil
  source 1..22: mol_type = other DNA
acacctctgtcagcacggcata

SEQ ID NO: 1446 - DNA, 22 bp, synthetic construct
  misc_feature 1..22: note = synthetic sequence
  modified_base 8: mod_base = OTHER; note = uracil
  modified_base 21: mod_base = OTHER; note = uracil
  source 1..22: mol_type = other DNA
acacctctgccagcacagcata

SEQ ID NO: 1447 - DNA, 22 bp, synthetic construct
  misc_feature 1..22: note = synthetic sequence
  modified_base 10: mod_base = OTHER; note = uracil
  modified_base 21: mod_base = OTHER; note = uracil
  source 1..22: mol_type = other DNA
acacgtctgtcagcacggcgtg

SEQ ID NO: 1448 - DNA, 22 bp, synthetic construct
  misc_feature 1..22: note = synthetic sequence
  modified_base 10: mod_base = OTHER; note = uracil
  modified_base 21: mod_base = OTHER; note = uracil
  source 1..22: mol_type = other DNA
acacctctgtcagcatggcata

SEQ ID NO: 1449 - DNA, 26 bp, synthetic construct
  misc_feature 1..26: note = synthetic sequence
  modified_base 4: mod_base = OTHER; note = uracil
  modified_base 23: mod_base = OTHER; note = uracil
  source 1..26: mol_type = other DNA
gcctgaggacgaggccgattattact

SEQ ID NO: 1450 - DNA, 26 bp, synthetic construct
  misc_feature 1..26: note = synthetic sequence
  modified_base 10: mod_base = OTHER; note = uracil
  modified_base 23: mod_base = OTHER; note = uracil
  source 1..26: mol_type = other DNA
agccggggatgaggctgactattact

SEQ ID NO: 1451 - DNA, 23 bp, synthetic construct
  misc_feature 1..23: note = synthetic sequence
  modified_base 16: mod_base = OTHER; note = uracil
  source 1..23: mol_type = other DNA
ggctggggacgaggctttcctct

SEQ ID NO: 1452 - DNA, 25 bp, synthetic construct
  misc_feature 1..25: note = synthetic sequence
  modified_base 7: mod_base = OTHER; note = uracil
  modified_base 22: mod_base = OTHER; note = uracil
  source 1..25: mol_type = other DNA
acaggatggaaacaaggctattact

SEQ ID NO: 1453 - DNA, 24 bp, synthetic construct
  misc_feature 1..24: note = synthetic sequence
  modified_base 7: mod_base = OTHER; note = uracil
  modified_base 21: mod_base = OTHER; note = uracil
  source 1..24: mol_type = other DNA
ccaggctgggacgaggctattact

SEQ ID NO: 1454 - DNA, 25 bp, synthetic construct
  misc_feature 1..25: note = synthetic sequence
  modified_base 19: mod_base = OTHER; note = uracil
  modified_base 22: mod_base = OTHER; note = uracil
  source 1..25: mol_type = other DNA
ccaggccagggacgaggctattact

SEQ ID NO: 1455 - DNA, 25 bp, synthetic construct
  misc_feature 1..25: note = synthetic sequence
  modified_base 7: mod_base = OTHER; note = uracil
  modified_base 22: mod_base = OTHER; note = uracil
  source 1..25: mol_type = other DNA
ccaggctggggaccaggctattact

SEQ ID NO: 1456 - DNA, 25 bp, synthetic construct
  misc_feature 1..25: note = synthetic sequence
  modified_base 7: mod_base = OTHER; note = uracil
  modified_base 22: mod_base = OTHER; note = uracil
  source 1..25: mol_type = other DNA
ccaggctggaaacaaggctattact

SEQ ID NO: 1457 - DNA, 25 bp, synthetic construct
  misc_feature 1..25: note = synthetic sequence
  modified_base 13: mod_base = OTHER; note = uracil
  modified_base 22: mod_base = OTHER; note = uracil
  source 1..25: mol_type = other DNA
cctgagatcaagtccgactattact

SEQ ID NO: 1458 - DNA, 25 bp, synthetic construct
  misc_feature 1..25: note = synthetic sequence
  modified_base 9: mod_base = OTHER; note = uracil
  modified_base 22: mod_base = OTHER; note = uracil
  source 1..25: mol_type = other DNA
ccgagaggtgaagctgagtactact

SEQ ID NO: 1459 - DNA, 22 bp, synthetic construct
  misc_feature 1..22: note = synthetic sequence
  source 1..22: mol_type = other DNA
gacggagaccaaggatgttgga

SEQ ID NO: 1460 - DNA, 22 bp, synthetic construct
  misc_feature 1..22: note = synthetic sequence
  source 1..22: mol_type = other DNA
ggtggaggctgaggatgttgga

SEQ ID NO: 1461 - DNA, 22 bp, synthetic construct
  misc_feature 1..22: note = synthetic sequence
  source 1..22: mol_type = other DNA
ggtagaggctgaggacgttggg

SEQ ID NO: 1462 - DNA, 22 bp, synthetic construct
  misc_feature 1..22: note = synthetic sequence
  source 1..22: mol_type = other DNA
ggtggaggctgaggattttgga

SEQ ID NO: 1463 - DNA, 22 bp, synthetic construct
  misc_feature 1..22: note = synthetic sequence
  source 1..22: mol_type = other DNA
ggtggaggctgaggatgttggg

SEQ ID NO: 1464 - DNA, 22 bp, synthetic construct
  misc_feature 1..22: note = synthetic sequence
  source 1..22: mol_type = other DNA
gacggagactaaggatgttgga

SEQ ID NO: 1465 - DNA, 22 bp, synthetic construct
  misc_feature 1..22: note = synthetic sequence
  source 1..22: mol_type = other DNA
agtggaggctgaggatgttggg

SEQ ID NO: 1466 - DNA, 22 bp, synthetic construct
  misc_feature 1..22: note = synthetic sequence
  source 1..22: mol_type = other DNA
ggtggaagctgaggatgtcggg

SEQ ID NO: 1467 - DNA, 22 bp, synthetic construct
  misc_feature 1..22: note = synthetic sequence
  source 1..22: mol_type = other DNA
gatggatgctgaggatgttggg

SEQ ID NO: 1468 - DNA, 22 bp, synthetic construct
  misc_feature 1..22: note = synthetic sequence
  source 1..22: mol_type = other DNA
ggtggaggctgaggatattcga

SEQ ID NO: 1469 - DNA, 23 bp, synthetic construct
  misc_feature 1..23: note = synthetic sequence
  source 1..23: mol_type = other DNA
gcacctggaggatcctcctcttg

SEQ ID NO: 1470 - DNA, 23 bp, synthetic construct
  misc_feature 1..23: note = synthetic sequence
  source 1..23: mol_type = other DNA
gcacctggaggatcctcttcttg

SEQ ID NO: 1471 - DNA, 23 bp, synthetic construct
  misc_feature 1..23: note = synthetic sequence
  source 1..23: mol_type = other DNA
ggatttggaggatcctcttcttg

SEQ ID NO: 1472 - DNA, 23 bp, synthetic construct
  misc_feature 1..23: note = synthetic sequence
  source 1..23: mol_type = other DNA
ggacctggagggtcttctgcttg

SEQ ID NO: 1473 - DNA, 23 bp, synthetic construct
  misc_feature 1..23: note = synthetic sequence
  source 1..23: mol_type = other DNA
ggatttggagggtcctcttcttg

SEQ ID NO: 1474 - DNA, 23 bp, synthetic construct
  misc_feature 1..23: note = synthetic sequence
  source 1..23: mol_type = other DNA
ggacctggagaatcctcttcttg

SEQ ID NO: 1475 - DNA, 23 bp, synthetic construct
  misc_feature 1..23: note = synthetic sequence
  source 1..23: mol_type = other DNA
ggacctggaggttcctctttgtg

SEQ ID NO: 1476 - DNA, 23 bp, synthetic construct
  misc_feature 1..23: note = synthetic sequence
  source 1..23: mol_type = other DNA
ggacctggagcatccttttcttg

SEQ ID NO: 1477 - DNA, 23 bp, synthetic construct
  misc_feature 1..23: note = synthetic sequence
  source 1..23: mol_type = other DNA
ggacctggaggatcctctttttg

SEQ ID NO: 1478 - DNA, 23 bp, synthetic construct
  misc_feature 1..23: note = synthetic sequence
  source 1..23: mol_type = other DNA
ggacctggaggatcctcttcttg

SEQ ID NO: 1479 - DNA, 21 bp, synthetic construct
  misc_feature 1..21: note = synthetic sequence
  source 1..21: mol_type = other DNA
ctttgttccacgctcctgctg

SEQ ID NO: 1480 - DNA, 21 bp, synthetic construct
  misc_feature 1..21: note = synthetic sequence
  source 1..21: mol_type = other DNA
ctttgctacacactcctgctg

SEQ ID NO: 1481 - DNA, 21 bp, synthetic construct
  misc_feature 1..21: note = synthetic sequence
  source 1..21: mol_type = other DNA
ctttgctccacgctcctgctg

SEQ ID NO: 1482 - DNA, 21 bp, synthetic construct
  misc_feature 1..21: note = synthetic sequence
  source 1..21: mol_type = other DNA
ctttgttccacgctcctgcta

SEQ ID NO: 1483 - DNA, 23 bp, synthetic construct
  misc_feature 1..23: note = synthetic sequence
  source 1..23: mol_type = other DNA
ttgggctgagctgggttttcctc

SEQ ID NO: 1484 - DNA, 23 bp, synthetic construct
  misc_feature 1..23: note = synthetic sequence
  source 1..23: mol_type = other DNA
tggggctgagctgggttttcctt

SEQ ID NO: 1485 - DNA, 23 bp, synthetic construct
  misc_feature 1..23: note = synthetic sequence
  source 1..23: mol_type = other DNA
tgggactgagctggattttcctt

SEQ ID NO: 1486 - DNA, 23 bp, synthetic construct
  misc_feature 1..23: note = synthetic sequence
  source 1..23: mol_type = other DNA
ttgggctgagctggctttttctt

SEQ ID NO: 1487 - DNA, 23 bp, synthetic construct
  misc_feature 1..23: note = synthetic sequence
  source 1..23: mol_type = other DNA
ttgggctgagctggattttcctt

SEQ ID NO: 1488 - DNA, 23 bp, synthetic construct
  misc_feature 1..23: note = synthetic sequence
  source 1..23: mol_type = other DNA
ttggactgagctgggttttcctt

SEQ ID NO: 1489 - DNA, 23 bp, synthetic construct
  misc_feature 1..23: note = synthetic sequence
  source 1..23: mol_type = other DNA
tggggctgtgctgggttttcctt

SEQ ID NO: 1490 - DNA, 23 bp, synthetic construct
  misc_feature 1..23: note = synthetic sequence
  source 1..23: mol_type = other DNA
ttgggcttagctgggttttcctt

SEQ ID NO: 1491 - DNA, 23 bp, synthetic construct
  misc_feature 1..23: note = synthetic sequence
  source 1..23: mol_type = other DNA
ttgggctgagctgggttttcctt

SEQ ID NO: 1492 - DNA, 23 bp, synthetic construct
  misc_feature 1..23: note = synthetic sequence
  source 1..23: mol_type = other DNA
tctggctgagctgggttctcctt

SEQ ID NO: 1493 - DNA, 23 bp, synthetic construct
  misc_feature 1..23: note = synthetic sequence
  source 1..23: mol_type = other DNA
tttggctgagctgggttttcctt

SEQ ID NO: 1494 - DNA, 23 bp, synthetic construct
  misc_feature 1..23: note = synthetic sequence
  source 1..23: mol_type = other DNA
tggggctccgctgggttttcctt

SEQ ID NO: 1495 - DNA, 24 bp, synthetic construct
  misc_feature 1..24: note = synthetic sequence
  source 1..24: mol_type = other DNA
catctgtggttcttccttctcctg

SEQ ID NO: 1496 - DNA, 24 bp, synthetic construct
  misc_feature 1..24: note = synthetic sequence
  source 1..24: mol_type = other DNA
cacctgtggtttttcctcctgctg

SEQ ID NO: 1497 - DNA, 24 bp, synthetic construct
  misc_feature 1..24: note = synthetic sequence
  source 1..24: mol_type = other DNA
cacctgtggttcttcctcctgctg

SEQ ID NO: 1498 - DNA, 24 bp, synthetic construct
  misc_feature 1..24: note = synthetic sequence
  source 1..24: mol_type = other DNA
cacctgtggttcttcctcctcctg

SEQ ID NO: 1499 - DNA, 24 bp, synthetic construct
  misc_feature 1..24: note = synthetic sequence
  source 1..24: mol_type = other DNA
cacctgtggttctttctcctcctg

SEQ ID NO: 1500 - DNA, 24 bp, synthetic construct
  misc_feature 1..24: note = synthetic sequence
  source 1..24: mol_type = other DNA
cacctgtggttcttcctgctcctg

SEQ ID NO: 1501 - DNA, 28 bp, synthetic construct
  misc_feature 1..28: note = synthetic sequence
  source 1..28: mol_type = other DNA
gaaaagactacatgattgctgagctgtt

SEQ ID NO: 1502 - DNA, 23 bp, synthetic construct
  misc_feature 1..23: note = synthetic sequence
  source 1..23: mol_type = other DNA
gggcctctccacttaaacccagg

SEQ ID NO: 1503 - DNA, 19 bp, synthetic construct
  misc_feature 1..19: note = synthetic sequence
  source 1..19: mol_type = other DNA
cgccatcctcgccctcctc

SEQ ID NO: 1504 - DNA, 23 bp, synthetic construct
  misc_feature 1..23: note = synthetic sequence
  source 1..23: mol_type = other DNA
ccttcctcatcttcctgcccgtg

SEQ ID NO: 1505 - DNA, 22 bp, synthetic construct
  misc_feature 1..22: note = synthetic sequence
  source 1..22: mol_type = other DNA
ccttcctcatcttcctgccgtg

SEQ ID NO: 1506 - DNA, 23 bp, synthetic construct
  misc_feature 1..23: note = synthetic sequence
  modified_base 13: mod_base = OTHER; note = uracil
  modified_base 22: mod_base = OTHER; note = uracil
  source 1..23: mol_type = other DNA
gcacctggaggatcctcctcttg

SEQ ID NO: 1507 - DNA, 23 bp, synthetic construct
  misc_feature 1..23: note = synthetic sequence
  modified_base 13: mod_base = OTHER; note = uracil
  modified_base 22: mod_base = OTHER; note = uracil
  source 1..23: mol_type = other DNA
gcacctggaggatcctcttcttg

SEQ ID NO: 1508 - DNA, 23 bp, synthetic construct
  misc_feature 1..23: note = synthetic sequence
  modified_base 13: mod_base = OTHER; note = uracil
  modified_base 22: mod_base = OTHER; note = uracil
  source 1..23: mol_type = other DNA
ggatttggaggatcctcttcttg

SEQ ID NO: 1509 - DNA, 23 bp, synthetic construct
  misc_feature 1..23: note = synthetic sequence
  modified_base 13: mod_base = OTHER; note = uracil
  modified_base 22: mod_base = OTHER; note = uracil
  source 1..23: mol_type = other DNA
ggacctggagggtcttctgcttg

SEQ ID NO: 1510 - DNA, 23 bp, synthetic construct
  misc_feature 1..23: note = synthetic sequence
  modified_base 13: mod_base = OTHER; note = uracil
  modified_base 22: mod_base = OTHER; note = uracil
  source 1..23: mol_type = other DNA
ggatttggagggtcctcttcttg

SEQ ID NO: 1511 - DNA, 23 bp, synthetic construct
  misc_feature 1..23: note = synthetic sequence
  modified_base 13: mod_base = OTHER; note = uracil
  modified_base 22: mod_base = OTHER; note = uracil
  source 1..23: mol_type = other DNA
ggacctggagaatcctcttcttg

SEQ ID NO: 1512 - DNA, 23 bp, synthetic construct
  misc_feature 1..23: note = synthetic sequence
  modified_base 12: mod_base = OTHER; note = uracil
  modified_base 22: mod_base = OTHER; note = uracil
  source 1..23: mol_type = other DNA
ggacctggaggttcctctttgtg

SEQ ID NO: 1513 - DNA, 23 bp, synthetic construct
  misc_feature 1..23: note = synthetic sequence
  modified_base 13: mod_base = OTHER; note = uracil
  modified_base 22: mod_base = OTHER; note = uracil
  source 1..23: mol_type = other DNA
ggacctggagcatccttttcttg

SEQ ID NO: 1514 - DNA, 23 bp, synthetic construct
  misc_feature 1..23: note = synthetic sequence
  modified_base 13: mod_base = OTHER; note = uracil
  modified_base 22: mod_base = OTHER; note = uracil
  source 1..23: mol_type = other DNA
ggacctggaggatcctctttttg

SEQ ID NO: 1515 - DNA, 23 bp, synthetic construct
  misc_feature 1..23: note = synthetic sequence
  modified_base 13: mod_base = OTHER; note = uracil
  modified_base 22: mod_base = OTHER; note = uracil
  source 1..23: mol_type = other DNA
ggacctggaggatcctcttcttg

SEQ ID NO: 1516 - DNA, 21 bp, synthetic construct
  misc_feature 1..21: note = synthetic sequence
  modified_base 14: mod_base = OTHER; note = uracil
  modified_base 20: mod_base = OTHER; note = uracil
  source 1..21: mol_type = other DNA
ctttgttccacgctcctgctg

SEQ ID NO: 1517 - DNA, 21 bp, synthetic construct
  misc_feature 1..21: note = synthetic sequence
  modified_base 7: mod_base = OTHER; note = uracil
  modified_base 20: mod_base = OTHER; note = uracil
  source 1..21: mol_type = other DNA
ctttgctacacactcctgctg

SEQ ID NO: 1518 - DNA, 21 bp, synthetic construct
  misc_feature 1..21: note = synthetic sequence
  modified_base 7: mod_base = OTHER; note = uracil
  modified_base 20: mod_base = OTHER; note = uracil
  source 1..21: mol_type = other DNA
ctttgctccacgctcctgctg

SEQ ID NO: 1519 - DNA, 21 bp, synthetic construct
  misc_feature 1..21: note = synthetic sequence
  modified_base 14: mod_base = OTHER; note = uracil
  modified_base 20: mod_base = OTHER; note = uracil
  source 1..21: mol_type = other DNA
ctttgttccacgctcctgcta

SEQ ID NO: 1520 - DNA, 23 bp, synthetic construct
  misc_feature 1..23: note = synthetic sequence
  modified_base 12: mod_base = OTHER; note = uracil
  modified_base 22: mod_base = OTHER; note = uracil
  source 1..23: mol_type = other DNA
ttgggctgagctgggttttcctc

SEQ ID NO: 1521 - DNA, 23 bp, synthetic construct
  misc_feature 1..23: note = synthetic sequence
  modified_base 12: mod_base = OTHER; note = uracil
  modified_base 22: mod_base = OTHER; note = uracil
  source 1..23: mol_type = other DNA
tggggctgagctgggttttcctt

SEQ ID NO: 1522 - DNA, 23 bp, synthetic construct
  misc_feature 1..23: note = synthetic sequence
  modified_base 12: mod_base = OTHER; note = uracil
  modified_base 22: mod_base = OTHER; note = uracil
  source 1..23: mol_type = other DNA
tgggactgagctggattttcctt

SEQ ID NO: 1523 - DNA, 23 bp, synthetic construct
  misc_feature 1..23: note = synthetic sequence
  modified_base 12: mod_base = OTHER; note = uracil
  modified_base 22: mod_base = OTHER; note = uracil
  source 1..23: mol_type = other DNA
ttgggctgagctggctttttctt

SEQ ID NO: 1524 - DNA, 23 bp, synthetic construct
  misc_feature 1..23: note = synthetic sequence
  modified_base 12: mod_base = OTHER; note = uracil
  modified_base 22: mod_base = OTHER; note = uracil
  source 1..23: mol_type = other DNA
ttgggctgagctggattttcctt

SEQ ID NO: 1525 - DNA, 23 bp, synthetic construct
  misc_feature 1..23: note = synthetic sequence
  modified_base 12: mod_base = OTHER; note = uracil
  modified_base 22: mod_base = OTHER; note = uracil
  source 1..23: mol_type = other DNA
ttggactgagctgggttttcctt

SEQ ID NO: 1526 - DNA, 23 bp, synthetic construct
  misc_feature 1..23: note = synthetic sequence
  modified_base 9: mod_base = OTHER; note = uracil
  modified_base 22: mod_base = OTHER; note = uracil
  source 1..23: mol_type = other DNA
tggggctgtgctgggttttcctt

SEQ ID NO: 1527 - DNA, 23 bp, synthetic construct
  misc_feature 1..23: note = synthetic sequence
  modified_base 12: mod_base = OTHER; note = uracil
  modified_base 22: mod_base = OTHER; note = uracil
  source 1..23: mol_type = other DNA
ttgggcttagctgggttttcctt

SEQ ID NO: 1528 - DNA, 23 bp, synthetic construct
  misc_feature 1..23: note = synthetic sequence
  modified_base 12: mod_base = OTHER; note = uracil
  modified_base 22: mod_base = OTHER; note = uracil
  source 1..23: mol_type = other DNA
ttgggctgagctgggttttcctt

SEQ ID NO: 1529 - DNA, 23 bp, synthetic construct
  misc_feature 1..23: note = synthetic sequence
  modified_base 12: mod_base = OTHER; note = uracil
  modified_base 22: mod_base = OTHER; note = uracil
  source 1..23: mol_type = other DNA
tctggctgagctgggttctcctt

SEQ ID NO: 1530 - DNA, 23 bp, synthetic construct
  misc_feature 1..23: note = synthetic sequence
  modified_base 12: mod_base = OTHER; note = uracil
  modified_base 22: mod_base = OTHER; note = uracil
  source 1..23: mol_type = other DNA
tttggctgagctgggttttcctt

SEQ ID NO: 1531 - DNA, 23 bp, synthetic construct
  misc_feature 1..23: note = synthetic sequence
  modified_base 12: mod_base = OTHER; note = uracil
  modified_base 22: mod_base = OTHER; note = uracil
  source 1..23: mol_type = other DNA
tggggctccgctgggttttcctt

SEQ ID NO: 1532 - DNA, 24 bp, synthetic construct
  misc_feature 1..24: note = synthetic sequence
  modified_base 11: mod_base = OTHER; note = uracil
  modified_base 23: mod_base = OTHER; note = uracil
  source 1..24: mol_type = other DNA
catctgtggttcttccttctcctg

SEQ ID NO: 1533 - DNA, 24 bp, synthetic construct
  misc_feature 1..24: note = synthetic sequence
  modified_base 11: mod_base = OTHER; note = uracil
  modified_base 23: mod_base = OTHER; note = uracil
  source 1..24: mol_type = other DNA
cacctgtggtttttcctcctgctg

SEQ ID NO: 1534 - DNA, 24 bp, synthetic construct
  misc_feature 1..24: note = synthetic sequence
  modified_base 11: mod_base = OTHER; note = uracil
  modified_base 23: mod_base = OTHER; note = uracil
  source 1..24: mol_type = other DNA
cacctgtggttcttcctcctgctg

SEQ ID NO: 1535 - DNA, 24 bp, synthetic construct
  misc_feature 1..24: note = synthetic sequence
  modified_base 11: mod_base = OTHER; note = uracil
  modified_base 23: mod_base = OTHER; note = uracil
  source 1..24: mol_type = other DNA
cacctgtggttcttcctcctcctg

SEQ ID NO: 1536 - DNA, 24 bp, synthetic construct
  misc_feature 1..24: note = synthetic sequence
  modified_base 11: mod_base = OTHER; note = uracil
  modified_base 23: mod_base = OTHER; note = uracil
  source 1..24: mol_type = other DNA
cacctgtggttctttctcctcctg

SEQ ID NO: 1537 - DNA, 24 bp, synthetic construct
  misc_feature 1..24: note = synthetic sequence
  modified_base 11: mod_base = OTHER; note = uracil
  modified_base 23: mod_base = OTHER; note = uracil
  source 1..24: mol_type = other DNA
cacctgtggttcttcctgctcctg

SEQ ID NO: 1538 - DNA, 28 bp, synthetic construct
  misc_feature 1..28: note = synthetic sequence
  modified_base 13: mod_base = OTHER; note = uracil
  modified_base 27: mod_base = OTHER; note = uracil
  source 1..28: mol_type = other DNA
gaaaagactacatgattgctgagctgtt

SEQ ID NO: 1539 - DNA, 23 bp, synthetic construct
  misc_feature 1..23: note = synthetic sequence
  modified_base 6: mod_base = OTHER; note = uracil
  modified_base 14: mod_base = OTHER; note = uracil
  source 1..23: mol_type = other DNA
gggcctctccacttaaacccagg

SEQ ID NO: 1540 - DNA, 19 bp, synthetic construct
  misc_feature 1..19: note = synthetic sequence
  modified_base 9: mod_base = OTHER; note = uracil
  modified_base 18: mod_base = OTHER; note = uracil
  source 1..19: mol_type = other DNA
cgccatcctcgccctcctc

SEQ ID NO: 1541 - DNA, 23 bp, synthetic construct
  misc_feature 1..23: note = synthetic sequence
  modified_base 12: mod_base = OTHER; note = uracil
  modified_base 22: mod_base = OTHER; note = uracil
  source 1..23: mol_type = other DNA
ccttcctcatcttcctgcccgtg

SEQ ID NO: 1542 - DNA, 22 bp, synthetic construct
  misc_feature 1..22: note = synthetic sequence
  modified_base 10: mod_base = OTHER; note = uracil
  modified_base 21: mod_base = OTHER; note = uracil
  source 1..22: mol_type = other DNA
ccttcctcatcttcctgccgtg

SEQ ID NO: 1543 - DNA, 23 bp, synthetic construct
  misc_feature 1..23: note = synthetic sequence
  source 1..23: mol_type = other DNA
agtgaaggtttcctgcaaggcat

SEQ ID NO: 1544 - DNA, 23 bp, synthetic construct
  misc_feature 1..23: note = synthetic sequence
  source 1..23: mol_type = other DNA
agtgaaggtctcctgcaaggttt

SEQ ID NO: 1545 - DNA, 23 bp, synthetic construct
  misc_feature 1..23: note = synthetic sequence
  source 1..23: mol_type = other DNA
agtgaaggtttcctgcaaggctt

SEQ ID NO: 1546 - DNA, 23 bp, synthetic construct
  misc_feature 1..23: note = synthetic sequence
  source 1..23: mol_type = other DNA
agtgaaggtctcctgcaaggctt

SEQ ID NO: 1547 - DNA, 23 bp, synthetic construct
  misc_feature 1..23: note = synthetic sequence
  source 1..23: mol_type = other DNA
agtgaaaatctcctgcaaggttt

SEQ ID NO: 1548 - DNA, 23 bp, synthetic construct
  misc_feature 1..23: note = synthetic sequence
  source 1..23: mol_type = other DNA
ggtgaaggtctcctgcaaggctt

SEQ ID NO: 1549 - DNA, 19 bp, synthetic construct
  misc_feature 1..19: note = synthetic sequence
  source 1..19: mol_type = other DNA
acgctgacctgcaccttct

SEQ ID NO: 1550 - DNA, 19 bp, synthetic construct
  misc_feature 1..19: note = synthetic sequence
  source 1..19: mol_type = other DNA
acgctgacccgcaccttct

SEQ ID NO: 1551 - DNA, 19 bp, synthetic construct
  misc_feature 1..19: note = synthetic sequence
  source 1..19: mol_type = other DNA
acactgacctgcgccttct

SEQ ID NO: 1552 - DNA, 19 bp, synthetic construct
  misc_feature 1..19: note = synthetic sequence
  source 1..19: mol_type = other DNA
acgctgacctgcaccgtct

SEQ ID NO: 1553 - DNA, 19 bp, synthetic construct
  misc_feature 1..19: note = synthetic sequence
  source 1..19: mol_type = other DNA
acactgacctgcaccttct

SEQ ID NO: 1554 - DNA, 22 bp, synthetic construct
  misc_feature 1..22: note = synthetic sequence
  source 1..22: mol_type = other DNA
ctgaaactctcctgtgcagcct

SEQ ID NO: 1555 - DNA, 22 bp, synthetic construct
  misc_feature 1..22: note = synthetic sequence
  source 1..22: mol_type = other DNA
ctgagactctcctttgcagcct

SEQ ID NO: 1556 - DNA, 22 bp, synthetic construct
  misc_feature 1..22: note = synthetic sequence
  source 1..22: mol_type = other DNA
ctgagactctcctgttcagcct

SEQ ID NO: 1557 - DNA, 22 bp, synthetic construct
  misc_feature 1..22: note = synthetic sequence
  source 1..22: mol_type = other DNA
cttagactctcctgtgcagcct

SEQ ID NO: 1558 - DNA, 22 bp, synthetic construct
  misc_feature 1..22: note = synthetic sequence
  source 1..22: mol_type = other DNA
ctgagactctcctgtgcagcct

SEQ ID NO: 1559 - DNA, 22 bp, synthetic construct
  misc_feature 1..22: note = synthetic sequence
  source 1..22: mol_type = other DNA
ctgagactctcctgtgcagcgt

SEQ ID NO: 1560 - DNA, 22 bp, synthetic construct
  misc_feature 1..22: note = synthetic sequence
  source 1..22: mol_type = other DNA
ctgagactctcctgtacagctt

SEQ ID NO: 1561 - DNA, 20 bp, synthetic construct
  misc_feature 1..20: note = synthetic sequence
  source 1..20: mol_type = other DNA
gtccctcacctgcgctgtct

SEQ ID NO: 1562 - DNA, 20 bp, synthetic construct
  misc_feature 1..20: note = synthetic sequence
  source 1..20: mol_type = other DNA
gtccctcacctgtactgtct

SEQ ID NO: 1563 - DNA, 20 bp, synthetic construct
  misc_feature 1..20: note = synthetic sequence
  source 1..20: mol_type = other DNA
gtccctcacctgcactgtct

SEQ ID NO: 1564 - DNA, 20 bp, synthetic construct
  misc_feature 1..20: note = synthetic sequence
  source 1..20: mol_type = other DNA
gtccctcacctgcgctatct

SEQ ID NO: 1565 - DNA, 20 bp, synthetic construct
  misc_feature 1..20: note = synthetic sequence
  source 1..20: mol_type = other DNA
gtccctcacctgcactgtca

SEQ ID NO: 1566 - DNA, 26 bp, synthetic construct
  misc_feature 1..26: note = synthetic sequence
  source 1..26: mol_type = other DNA
gtctctgaagatctcctgtaagggtt

SEQ ID NO: 1567 - DNA, 26 bp, synthetic construct
  misc_feature 1..26: note = synthetic sequence
  source 1..26: mol_type = other DNA
gtctctgaggatctcctgtaagggtt

SEQ ID NO: 1568 - DNA, 23 bp, synthetic construct
  misc_feature 1..23: note = synthetic sequence
  source 1..23: mol_type = other DNA
cctctcactcacctgtgccatct

SEQ ID NO: 1569 - DNA, 23 bp, synthetic construct
  misc_feature 1..23: note = synthetic sequence
  source 1..23: mol_type = other DNA
agtgaaggtttcctgcaaggctt

SEQ ID NO: 1570 - DNA, 21 bp, synthetic construct
  misc_feature 1..21: note = synthetic sequence
  source 1..21: mol_type = other DNA
gggctgaggtgaagaagcttg

SEQ ID NO: 1571 - DNA, 21 bp, synthetic construct
  misc_feature 1..21: note = synthetic sequence
  source 1..21: mol_type = other DNA
gagctgaggtgaagaagcctg

SEQ ID NO: 1572 - DNA, 21 bp, synthetic construct
  misc_feature 1..21: note = synthetic sequence
  source 1..21: mol_type = other DNA
ggtctgagttgaagaagcctg

SEQ ID NO: 1573 - DNA, 21 bp, synthetic construct
  misc_feature 1..21: note = synthetic sequence
  source 1..21: mol_type = other DNA
gggctgaggtgaagaagactg

SEQ ID NO: 1574 - DNA, 21 bp, synthetic construct
  misc_feature 1..21: note = synthetic sequence
  source 1..21: mol_type = other DNA
ggcctgaggtgaagaagcctg

SEQ ID NO: 1575 - DNA, 21 bp, synthetic construct
  misc_feature 1..21: note = synthetic sequence
  source 1..21: mol_type = other DNA
gggctgaggtgaagaagcctg

SEQ ID NO: 1576 - DNA, 22 bp, synthetic construct
  misc_feature 1..22: note = synthetic sequence
  source 1..22: mol_type = other DNA
gtctggtcctacgctggtaaaa

SEQ ID NO: 1577 - DNA, 22 bp, synthetic construct
  misc_feature 1..22: note = synthetic sequence
  source 1..22: mol_type = other DNA
gtctggtcctgcgctggtgaaa

SEQ ID NO: 1578 - DNA, 22 bp, synthetic construct
  misc_feature 1..22: note = synthetic sequence
  source 1..22: mol_type = other DNA
gtctggtcctgtgctggtgaaa

SEQ ID NO: 1579 - DNA, 22 bp, synthetic construct
  misc_feature 1..22: note = synthetic sequence
  source 1..22: mol_type = other DNA
gtctggtcctacgctggtgaaa

SEQ ID NO: 1580 - DNA, 21 bp, synthetic construct
  misc_feature 1..21: note = synthetic sequence
  source 1..21: mol_type = other DNA
ggtcccttagactctcctgtg

SEQ ID NO: 1581 - DNA, 21 bp, synthetic construct
  misc_feature 1..21: note = synthetic sequence
  source 1..21: mol_type = other DNA
ggtccctgagactctcctgta

SEQ ID NO: 1582 - DNA, 21 bp, synthetic construct
  misc_feature 1..21: note = synthetic sequence
  source 1..21: mol_type = other DNA
cgtccctgagactctcctgta

SEQ ID NO: 1583 - DNA, 21 bp, synthetic construct
  misc_feature 1..21: note = synthetic sequence
  source 1..21: mol_type = other DNA
ggtccctgaaactctcctgtg

SEQ ID NO: 1584 - DNA, 21 bp, synthetic construct
  misc_feature 1..21: note = synthetic sequence
  source 1..21: mol_type = other DNA
ggtccctgagactctcctttg

SEQ ID NO: 1585 - DNA, 21 bp, synthetic construct
  misc_feature 1..21: note = synthetic sequence
  source 1..21: mol_type = other DNA
gggccctgagactctcctgtg

SEQ ID NO: 1586 - DNA, 21 bp, synthetic construct
  misc_feature 1..21: note = synthetic sequence
  source 1..21: mol_type = other DNA
ggtccctgagactctcctgtt

SEQ ID NO: 1587 - DNA, 21 bp, synthetic construct
  misc_feature 1..21: note = synthetic sequence
  source 1..21: mol_type = other DNA
ggtccctgagactctcctgtg

SEQ ID NO: 1588 - DNA, 19 bp, synthetic construct
  misc_feature 1..19: note = synthetic sequence
  source 1..19: mol_type = other DNA
gggcgcaggactgttgaag

SEQ ID NO: 1589 - DNA, 19 bp, synthetic construct
  misc_feature 1..19: note = synthetic sequence
  source 1..19: mol_type = other DNA
aggtccaggactggtgaag

SEQ ID NO: 1590 - DNA, 19 bp, synthetic construct
  misc_feature 1..19: note = synthetic sequence
  source 1..19: mol_type = other DNA
cggctcaggactggtgaag

SEQ ID NO: 1591 - DNA, 19 bp, synthetic construct
  misc_feature 1..19: note = synthetic sequence
  source 1..19: mol_type = other DNA
gggcccaggactgttgaag

SEQ ID NO: 1592 - DNA, 19 bp, synthetic construct
  misc_feature 1..19: note = synthetic sequence
  source 1..19: mol_type = other DNA
gggcccaggactggtgaag

SEQ ID NO: 1593 - DNA, 19 bp, synthetic construct
  misc_feature 1..19: note = synthetic sequence
  source 1..19: mol_type = other DNA
aggtccgggactggtgaag

SEQ ID NO: 1594 - DNA, 22 bp, synthetic construct
  misc_feature 1..22: note = synthetic sequence
  source 1..22: mol_type = other DNA
gcagtctggagcagaggtgaaa

SEQ ID NO: 1595 - DNA, 22 bp, synthetic construct
  misc_feature 1..22: note = synthetic sequence
  source 1..22: mol_type = other DNA
gcagtccggagcagaggtgaaa

SEQ ID NO: 1596 - DNA, 21 bp, synthetic construct
  misc_feature 1..21: note = synthetic sequence
  source 1..21: mol_type = other DNA
ggctgaggtgaagaagcctgg

SEQ ID NO: 1597 - DNA, 21 bp, synthetic construct
  misc_feature 1..21: note = synthetic sequence
  source 1..21: mol_type = other DNA
agctgaggtgaagaagcctgg

SEQ ID NO: 1598 - DNA, 21 bp, synthetic construct
  misc_feature 1..21: note = synthetic sequence
  source 1..21: mol_type = other DNA
gcctgaggtgaagaagcctgg

SEQ ID NO: 1599 - DNA, 21 bp, synthetic construct
  misc_feature 1..21: note = synthetic sequence
  source 1..21: mol_type = other DNA
ggctgaggtgaagaagcttgg

SEQ ID NO: 1600 - DNA, 21 bp, synthetic construct
  misc_feature 1..21: note = synthetic sequence
  source 1..21: mol_type = other DNA
ggctgaggtgaagaagactgg

SEQ ID NO: 1601 - DNA, 21 bp, synthetic construct
  misc_feature 1..21: note = synthetic sequence
  source 1..21: mol_type = other DNA
gtctgagttgaagaagcctgg

SEQ ID NO: 1602 - DNA, 20 bp, synthetic construct
  misc_feature 1..20: note = synthetic sequence
  source 1..20: mol_type = other DNA
gtcctacgctggtgaaaccc

SEQ ID NO: 1603 - DNA, 20 bp, synthetic construct
  misc_feature 1..20: note = synthetic sequence
  source 1..20: mol_type = other DNA
gtcctgtgctggtgaaaccc

SEQ ID NO: 1604 - DNA, 20 bp, synthetic construct
  misc_feature 1..20: note = synthetic sequence
  source 1..20: mol_type = other DNA
gtcctgcgctggtgaaaccc

SEQ ID NO: 1605 - DNA, 20 bp, synthetic construct
  misc_feature 1..20: note = synthetic sequence
  source 1..20: mol_type = other DNA
gtcctacgctggtaaaaccc

SEQ ID NO: 1606 - DNA, 20 bp, synthetic construct
  misc_feature 1..20: note = synthetic sequence
  source 1..20: mol_type = other DNA
gtccaggactggtgaagccc

SEQ ID NO: 1607 - DNA, 20 bp, synthetic construct
  misc_feature 1..20: note = synthetic sequence
  source 1..20: mol_type = other DNA
gcccaggactgttgaagcct

SEQ ID NO: 1608 - DNA, 20 bp, synthetic construct
  misc_feature 1..20: note = synthetic sequence
  source 1..20: mol_type = other DNA
gtccgggactggtgaagccc

SEQ ID NO: 1609 - DNA, 20 bp, synthetic construct
  misc_feature 1..20: note = synthetic sequence
  source 1..20: mol_type = other DNA
gctcaggactggtgaagcct

SEQ ID NO: 1610 - DNA, 20 bp, synthetic construct
  misc_feature 1..20: note = synthetic sequence
  source 1..20: mol_type = other DNA
gcccaggactggtgaagcct

SEQ ID NO: 1611 - DNA, 20 bp, synthetic construct
  misc_feature 1..20: note = synthetic sequence
  source 1..20: mol_type = other DNA
gcgcaggactgttgaagcct

SEQ ID NO: 1612 - DNA, 23 bp, synthetic construct
  misc_feature 1..23: note = synthetic sequence
  source 1..23: mol_type = other DNA
gcagtccggagcagaggtgaaaa

SEQ ID NO: 1613 - DNA, 23 bp, synthetic construct
  misc_feature 1..23: note = synthetic sequence
  source 1..23: mol_type = other DNA
gcagtctggagcagaggtgaaaa

SEQ ID NO: 1614 - DNA, 22 bp, synthetic construct
  misc_feature 1..22: note = synthetic sequence
  source 1..22: mol_type = other DNA
ggtctgagttgaagaagcctgg

SEQ ID NO: 1615 - DNA, 22 bp, synthetic construct
  misc_feature 1..22: note = synthetic sequence
  source 1..22: mol_type = other DNA
ggcctgaggtgaagaagcctgg

SEQ ID NO: 1616 - DNA, 22 bp, synthetic construct
  misc_feature 1..22: note = synthetic sequence
  source 1..22: mol_type = other DNA
gggctgaggtgaagaagactgg

SEQ ID NO: 1617 - DNA, 22 bp, synthetic construct
  misc_feature 1..22: note = synthetic sequence
  source 1..22: mol_type = other DNA
gggctgaggtgaagaagcttgg

SEQ ID NO: 1618 - DNA, 22 bp, synthetic construct
  misc_feature 1..22: note = synthetic sequence
  source 1..22: mol_type = other DNA
gagctgaggtgaagaagcctgg

SEQ ID NO: 1619 - DNA, 22 bp, synthetic construct
  misc_feature 1..22: note = synthetic sequence
  source 1..22: mol_type = other DNA
gggctgaggtgaagaagcctgg

SEQ ID NO: 1620 - DNA, 20 bp, synthetic construct
  misc_feature 1..20: note = synthetic sequence
  source 1..20: mol_type = other DNA
cctgcgctggtgaaacccac

SEQ ID NO: 1621 - DNA, 20 bp, synthetic construct
  misc_feature 1..20: note = synthetic sequence
  source 1..20: mol_type = other DNA
cctgtgctggtgaaacccac

SEQ ID NO: 1622 - DNA, 20 bp, synthetic construct
  misc_feature 1..20: note = synthetic sequence
  source 1..20: mol_type = other DNA
cctacgctggtgaaacccac

SEQ ID NO: 1623 - DNA, 20 bp, synthetic construct
  misc_feature 1..20: note = synthetic sequence
  source 1..20: mol_type = other DNA
cctacgctggtaaaacccac

SEQ ID NO: 1624 - DNA, 22 bp, synthetic construct
  misc_feature 1..22: note = synthetic sequence
  source 1..22: mol_type = other DNA
ggctgaggtgaagaagcctggg

SEQ ID NO: 1625 - DNA, 22 bp, synthetic construct
  misc_feature 1..22: note = synthetic sequence
  source 1..22: mol_type = other DNA
gcctgaggtgaagaagcctggg

SEQ ID NO: 1626 - DNA, 22 bp, synthetic construct
  misc_feature 1..22: note = synthetic sequence
  source 1..22: mol_type = other DNA
ggctgaggtgaagaagcttggg

SEQ ID NO: 1627 - DNA, 22 bp, synthetic construct
  misc_feature 1..22: note = synthetic sequence
  source 1..22: mol_type = other DNA
agctgaggtgaagaagcctggg

SEQ ID NO: 1628 - DNA, 22 bp, synthetic construct
  misc_feature 1..22: note = synthetic sequence
  source 1..22: mol_type = other DNA
gtctgagttgaagaagcctggg

SEQ ID NO: 1629 - DNA, 22 bp, synthetic construct
  misc_feature 1..22: note = synthetic sequence
  source 1..22: mol_type = other DNA
ggctgaggtgaagaagactggg

SEQ ID NO: 1630 - DNA, 20 bp, synthetic construct
  misc_feature 1..20: note = synthetic sequence
  source 1..20: mol_type = other DNA
tgcgctggtgaaacccacac

SEQ ID NO: 1631 - DNA, 20 bp, synthetic construct
  misc_feature 1..20: note = synthetic sequence
  source 1..20: mol_type = other DNA
tacgctggtaaaacccacac

SEQ ID NO: 1632 - DNA, 20 bp, synthetic construct
  misc_feature 1..20: note = synthetic sequence
  source 1..20: mol_type = other DNA
tgtgctggtgaaacccacag

SEQ ID NO: 1633 - DNA, 20 bp, synthetic construct
  misc_feature 1..20: note = synthetic sequence
  source 1..20: mol_type = other DNA
tacgctggtgaaacccacac

SEQ ID NO: 1634 - DNA, 22 bp, synthetic construct
  misc_feature 1..22: note = synthetic sequence
  source 1..22: mol_type = other DNA
tcctcggtgaaggtctcctgca

SEQ ID NO: 1635 - DNA, 22 bp, synthetic construct
  misc_feature 1..22: note = synthetic sequence
  source 1..22: mol_type = other DNA
gcctcagtgaaggtctcctgca

SEQ ID NO: 1636 - DNA, 22 bp, synthetic construct
  misc_feature 1..22: note = synthetic sequence
  source 1..22: mol_type = other DNA
tcctcagtgaaggtctcctgca

SEQ ID NO: 1637 - DNA, 22 bp, synthetic construct
  misc_feature 1..22: note = synthetic sequence
  source 1..22: mol_type = other DNA
acctcagtgaaggtctcctgca

SEQ ID NO: 1638 - DNA, 22 bp, synthetic construct
  misc_feature 1..22: note = synthetic sequence
  source 1..22: mol_type = other DNA
gcctcagtgaaggtttcctgca

SEQ ID NO: 1639 - DNA, 22 bp, synthetic construct
  misc_feature 1..22: note = synthetic sequence
  source 1..22: mol_type = other DNA
tcctcagtgaaggtttcctgca

SEQ ID NO: 1640 - DNA, 22 bp, synthetic construct
  misc_feature 1..22: note = synthetic sequence
  source 1..22: mol_type = other DNA
gctacagtgaaaatctcctgca

SEQ ID NO: 1641 - DNA, 20 bp, synthetic construct
  misc_feature 1..20: note = synthetic sequence
  source 1..20: mol_type = other DNA
cagaccctcacactgacctg

SEQ ID NO: 1642 - DNA, 20 bp, synthetic construct
  misc_feature 1..20: note = synthetic sequence
  source 1..20: mol_type = other DNA
gagaccctcacgctgacctg

SEQ ID NO: 1643 - DNA, 20 bp, synthetic construct
  misc_feature 1..20: note = synthetic sequence
  source 1..20: mol_type = other DNA
cagaccctcacgctgacctg

SEQ ID NO: 1644 - DNA, 20 bp, synthetic construct
  misc_feature 1..20: note = synthetic sequence
  source 1..20: mol_type = other DNA
cagaccctcacgctgacccg

SEQ ID NO: 1645 - DNA, 20 bp, synthetic construct
  misc_feature 1..20: note = synthetic sequence
  source 1..20: mol_type = other DNA
ctgtccctcacctgtactgt

SEQ ID NO: 1646 - DNA, 20 bp, synthetic construct
  misc_feature 1..20: note = synthetic sequence
  source 1..20: mol_type = other DNA
ccgtccctcacctgcactgt

SEQ ID NO: 1647 - DNA, 20 bp, synthetic construct
  misc_feature 1..20: note = synthetic sequence
  source 1..20: mol_type = other DNA
ctctcactcacctgtgccat

SEQ ID NO: 1648 - DNA, 20 bp, synthetic construct
  misc_feature 1..20: note = synthetic sequence
  source 1..20: mol_type = other DNA
ctgtccctcacctgcactgt

SEQ ID NO: 1649 - DNA, 20 bp, synthetic construct
  misc_feature 1..20: note = synthetic sequence
  source 1..20: mol_type = other DNA
ctgtccctcacctgcgctat

SEQ ID NO: 1650 - DNA, 20 bp, synthetic construct
  misc_feature 1..20: note = synthetic sequence
  source 1..20: mol_type = other DNA
ctgtccctcacctgcgctgt

SEQ ID NO: 1651 - DNA, 24 bp, synthetic construct
  misc_feature 1..24: note = synthetic sequence
  source 1..24: mol_type = other DNA
gggagtctctgaggatctcctgta

SEQ ID NO: 1652 - DNA, 24 bp, synthetic construct
  misc_feature 1..24: note = synthetic sequence
  source 1..24: mol_type = other DNA
gggagtctctgaagatctcctgta

SEQ ID NO: 1653 - DNA, 22 bp, synthetic construct
  misc_feature 1..22: note = synthetic sequence
  source 1..22: mol_type = other DNA
tcggtgaaggtctcctgcaagg

SEQ ID NO: 1654 - DNA, 22 bp, synthetic construct
  misc_feature 1..22: note = synthetic sequence
  source 1..22: mol_type = other DNA
tcagtgaaggtttcctgcaagg

SEQ ID NO: 1655 - DNA, 22 bp, synthetic construct
  misc_feature 1..22: note = synthetic sequence
  source 1..22: mol_type = other DNA
acagtgaaaatctcctgcaagg

SEQ ID NO: 1656 - DNA, 22 bp, synthetic construct
  misc_feature 1..22: note = synthetic sequence
  source 1..22: mol_type = other DNA
tcagtgaaggtctcctgcaagg

SEQ ID NO: 1657 - DNA, 19 bp, synthetic construct
  misc_feature 1..19: note = synthetic sequence
  source 1..19: mol_type = other DNA
tcacgctgacctgcaccgt

SEQ ID NO: 1658 - DNA, 19 bp, synthetic construct
  misc_feature 1..19: note = synthetic sequence
  source 1..19: mol_type = other DNA
tcacgctgacccgcacctt

SEQ ID NO: 1659 - DNA, 19 bp, synthetic construct
  misc_feature 1..19: note = synthetic sequence
  source 1..19: mol_type = other DNA
tcacactgacctgcgcctt

SEQ ID NO: 1660 - DNA, 19 bp, synthetic construct
  misc_feature 1..19: note = synthetic sequence
  source 1..19: mol_type = other DNA
tcacactgacctgcacctt

SEQ ID NO: 1661 - DNA, 19 bp, synthetic construct
  misc_feature 1..19: note = synthetic sequence
  source 1..19: mol_type = other DNA
tcacgctgacctgcacctt

SEQ ID NO: 1662 - DNA, 22 bp, synthetic construct
  misc_feature 1..22: note = synthetic sequence
  source 1..22: mol_type = other DNA
ccctgagactctcctgtacagc

SEQ ID NO: 1663 - DNA, 22 bp, synthetic construct
  misc_feature 1..22: note = synthetic sequence
  source 1..22: mol_type = other DNA
ccctgagactctcctgttcagc

SEQ ID NO: 1664 - DNA, 22 bp, synthetic construct
  misc_feature 1..22: note = synthetic sequence
  source 1..22: mol_type = other DNA
ccctgagactctcctttgcagc

SEQ ID NO: 1665 - DNA, 22 bp, synthetic construct
  misc_feature 1..22: note = synthetic sequence
  source 1..22: mol_type = other DNA
ccctgaaactctcctgtgcagc

SEQ ID NO: 1666 - DNA, 22 bp, synthetic construct
  misc_feature 1..22: note = synthetic sequence
  source 1..22: mol_type = other DNA
ccctgagactctcctgtgcagc

SEQ ID NO: 1667 - DNA, 22 bp, synthetic construct
  misc_feature 1..22: note = synthetic sequence
  source 1..22: mol_type = other DNA
cccttagactctcctgtgcagc

SEQ ID NO: 1668 - DNA, 26 bp, synthetic construct
  misc_feature 1..26: note = synthetic sequence
  source 1..26: mol_type = other DNA
gagtctctgaagatctcctgtaaggg

SEQ ID NO: 1669 - DNA, 26 bp, synthetic construct
  misc_feature 1..26: note = synthetic sequence
  source 1..26: mol_type = other DNA
gagtctctgaggatctcctgtaaggg

SEQ ID NO: 1670 - DNA, 24 bp, synthetic construct
  misc_feature 1..24: note = synthetic sequence
  source 1..24: mol_type = other DNA
gtgaaggtctcctgcaaggcttct

SEQ ID NO: 1671 - DNA, 24 bp, synthetic construct
  misc_feature 1..24: note = synthetic sequence
  source 1..24: mol_type = other DNA
gtgaaaatctcctgcaaggtttct

SEQ ID NO: 1672 - DNA, 24 bp, synthetic construct
  misc_feature 1..24: note = synthetic sequence
  source 1..24: mol_type = other DNA
gtgaaggtttcctgcaaggcatct

SEQ ID NO: 1673 - DNA, 24 bp, synthetic construct
  misc_feature 1..24: note = synthetic sequence
  source 1..24: mol_type = other DNA
gtgaaggtttcctgcaaggcttct

SEQ ID NO: 1674 - DNA, 24 bp, synthetic construct
  misc_feature 1..24: note = synthetic sequence
  source 1..24: mol_type = other DNA
gtgaaggtttcctgcaaggcttcc

SEQ ID NO: 1675 - DNA, 24 bp, synthetic construct
  misc_feature 1..24: note = synthetic sequence
  source 1..24: mol_type = other DNA
gtgaaggtctcctgcaaggtttcc

SEQ ID NO: 1676 - DNA, 20 bp, synthetic construct
  misc_feature 1..20: note = synthetic sequence
  source 1..20: mol_type = other DNA
acgctgacccgcaccttctc

SEQ ID NO: 1677 - DNA, 20 bp, synthetic construct
  misc_feature 1..20: note = synthetic sequence
  source 1..20: mol_type = other DNA
acgctgacctgcaccttctc

SEQ ID NO: 1678 - DNA, 20 bp, synthetic construct
  misc_feature 1..20: note = synthetic sequence
  source 1..20: mol_type = other DNA
acgctgacctgcaccgtctc

SEQ ID NO: 1679 - DNA, 20 bp, synthetic construct
  misc_feature 1..20: note = synthetic sequence
  source 1..20: mol_type = other DNA
acactgacctgcgccttctc

SEQ ID NO: 1680 - DNA, 20 bp, synthetic construct
  misc_feature 1..20: note = synthetic sequence
  source 1..20: mol_type = other DNA
acactgacctgcaccttctc

SEQ ID NO: 1681 - DNA, 21 bp, synthetic construct
  misc_feature 1..21: note = synthetic sequence
  source 1..21: mol_type = other DNA
gtccctcacctgcactgtctc

SEQ ID NO: 1682 - DNA, 21 bp, synthetic construct
  misc_feature 1..21: note = synthetic sequence
  source 1..21: mol_type = other DNA
gtccctcacctgtactgtctc

SEQ ID NO: 1683 - DNA, 21 bp, synthetic construct
  misc_feature 1..21: note = synthetic sequence
  source 1..21: mol_type = other DNA
gtccctcacctgcgctatctc

SEQ ID NO: 1684 - DNA, 21 bp, synthetic construct
  misc_feature 1..21: note = synthetic sequence
  source 1..21: mol_type = other DNA
gtccctcacctgcactgtcac

SEQ ID NO: 1685 - DNA, 21 bp, synthetic construct
  misc_feature 1..21: note = synthetic sequence
  source 1..21: mol_type = other DNA
ctcactcacctgtgccatctc

SEQ ID NO: 1686 - DNA, 21 bp, synthetic construct
  misc_feature 1..21: note = synthetic sequence
  source 1..21: mol_type = other DNA
gtccctcacctgcgctgtcta

SEQ ID NO: 1687 - DNA, 21 bp, synthetic construct
  misc_feature 1..21: note = synthetic sequence
  source 1..21: mol_type = other DNA
gtccctcacctgcgctgtctc

SEQ ID NO: 1688 - DNA, 27 bp, synthetic construct
  misc_feature 1..27: note = synthetic sequence
  source 1..27: mol_type = other DNA
gtctctgaggatctcctgtaagggttc

SEQ ID NO: 1689 - DNA, 27 bp, synthetic construct
  misc_feature 1..27: note = synthetic sequence
  source 1..27: mol_type = other DNA
gtctctgaagatctcctgtaagggttc

SEQ ID NO: 1690 - DNA, 23 bp, synthetic construct
  misc_feature 1..23: note = synthetic sequence
  modified_base 9: mod_base = OTHER; note = uracil
  modified_base 14: mod_base = OTHER; note = uracil
  source 1..23: mol_type = other DNA
agtgaaggtttcctgcaaggcat

SEQ ID NO: 1691 - DNA, 23 bp, synthetic construct
  misc_feature 1..23: note = synthetic sequence
  modified_base 11: mod_base = OTHER; note = uracil
  modified_base 22: mod_base = OTHER; note = uracil
  source 1..23: mol_type = other DNA
agtgaaggtctcctgcaaggttt

SEQ ID NO: 1692 - DNA, 23 bp, synthetic construct
  misc_feature 1..23: note = synthetic sequence
  modified_base 11: mod_base = OTHER; note = uracil
  modified_base 22: mod_base = OTHER; note = uracil
  source 1..23: mol_type = other DNA
agtgaaggtttcctgcaaggctt

SEQ ID NO: 1693 - DNA, 23 bp, synthetic construct
  misc_feature 1..23: note = synthetic sequence
  modified_base 11: mod_base = OTHER; note = uracil
  modified_base 22: mod_base = OTHER; note = uracil
  source 1..23: mol_type = other DNA
agtgaaggtctcctgcaaggctt

SEQ ID NO: 1694 - DNA, 23 bp, synthetic construct
  misc_feature 1..23: note = synthetic sequence
  modified_base 11: mod_base = OTHER; note = uracil
  modified_base 22: mod_base = OTHER; note = uracil
  source 1..23: mol_type = other DNA
agtgaaaatctcctgcaaggttt

SEQ ID NO: 1695 - DNA, 23 bp, synthetic construct
  misc_feature 1..23: note = synthetic sequence
  modified_base 11: mod_base = OTHER; note = uracil
  modified_base 22: mod_base = OTHER; note = uracil
  source 1..23: mol_type = other DNA
ggtgaaggtctcctgcaaggctt

SEQ ID NO: 1696 - DNA, 19 bp, synthetic construct
  misc_feature 1..19: note = synthetic sequence
  modified_base 10: mod_base = OTHER; note = uracil
  modified_base 17: mod_base = OTHER; note = uracil
  source 1..19: mol_type = other DNA
acgctgacctgcaccttct

SEQ ID NO: 1697 - DNA, 19 bp, synthetic construct
  misc_feature 1..19: note = synthetic sequence
  modified_base 5: mod_base = OTHER; note = uracil
  modified_base 17: mod_base = OTHER; note = uracil
  source 1..19: mol_type = other DNA
acgctgacccgcaccttct

SEQ ID NO: 1698 - DNA, 19 bp, synthetic construct
  misc_feature 1..19: note = synthetic sequence
  modified_base 10: mod_base = OTHER; note = uracil
  modified_base 17: mod_base = OTHER; note = uracil
  source 1..19: mol_type = other DNA
acactgacctgcgccttct

SEQ ID NO: 1699 - DNA, 19 bp, synthetic construct
  misc_feature 1..19: note = synthetic sequence
  modified_base 10: mod_base = OTHER; note = uracil
  modified_base 17: mod_base = OTHER; note = uracil
  source 1..19: mol_type = other DNA
acgctgacctgcaccgtct

SEQ ID NO: 1700 - DNA, 19 bp, synthetic construct
  misc_feature 1..19: note = synthetic sequence
  modified_base 10: mod_base = OTHER; note = uracil
  modified_base 17: mod_base = OTHER; note = uracil
  source 1..19: mol_type = other DNA
acactgacctgcaccttct

SEQ ID NO: 1701 - DNA, 22 bp, synthetic construct
  misc_feature 1..22: note = synthetic sequence
  modified_base 8: mod_base = OTHER; note = uracil
  modified_base 15: mod_base = OTHER; note = uracil
  source 1..22: mol_type = other DNA
ctgaaactctcctgtgcagcct

SEQ ID NO: 1702 - DNA, 22 bp, synthetic construct
  misc_feature 1..22: note = synthetic sequence
  modified_base 8: mod_base = OTHER; note = uracil
  modified_base 15: mod_base = OTHER; note = uracil
  source 1..22: mol_type = other DNA
ctgagactctcctttgcagcct

SEQ ID NO: 1703 - DNA, 22 bp, synthetic construct
  misc_feature 1..22: note = synthetic sequence
  modified_base 8: mod_base = OTHER; note = uracil
  modified_base 16: mod_base = OTHER; note = uracil
  source 1..22: mol_type = other DNA
ctgagactctcctgttcagcct

SEQ ID NO: 1704 - DNA, 22 bp, synthetic construct
  misc_feature 1..22: note = synthetic sequence
  modified_base 8: mod_base = OTHER; note = uracil
  modified_base 15: mod_base = OTHER; note = uracil
  source 1..22: mol_type = other DNA
cttagactctcctgtgcagcct

SEQ ID NO: 1705 - DNA, 22 bp, synthetic construct
  misc_feature 1..22: note = synthetic sequence
  modified_base 8: mod_base = OTHER; note = uracil
  modified_base 15: mod_base = OTHER; note = uracil
  source 1..22: mol_type = other DNA
ctgagactctcctgtgcagcct

SEQ ID NO: 1706 - DNA, 22 bp, synthetic construct
  misc_feature 1..22: note = synthetic sequence
  modified_base 8: mod_base = OTHER; note = uracil
  modified_base 15: mod_base = OTHER; note = uracil
  source 1..22: mol_type = other DNA
ctgagactctcctgtgcagcgt

SEQ ID NO: 1707 - DNA, 22 bp, synthetic construct
  misc_feature 1..22: note = synthetic sequence
  modified_base 10: mod_base = OTHER; note = uracil
  modified_base 21: mod_base = OTHER; note = uracil
  source 1..22: mol_type = other DNA
ctgagactctcctgtacagctt

SEQ ID NO: 1708 - DNA, 20 bp, synthetic construct
  misc_feature 1..20: note = synthetic sequence
  modified_base 11: mod_base = OTHER; note = uracil
  modified_base 18: mod_base = OTHER; note = uracil
  source 1..20: mol_type = other DNA
gtccctcacctgcgctgtct

SEQ ID NO: 1709 - DNA, 20 bp, synthetic construct
  misc_feature 1..20: note = synthetic sequence
  modified_base 6: mod_base = OTHER; note = uracil
  modified_base 18: mod_base = OTHER; note = uracil
  source 1..20: mol_type = other DNA
gtccctcacctgtactgtct

SEQ ID NO: 1710 - DNA, 20 bp, synthetic construct
  misc_feature 1..20: note = synthetic sequence
  modified_base 11: mod_base = OTHER; note = uracil
  modified_base 18: mod_base = OTHER; note = uracil
  source 1..20: mol_type = other DNA
gtccctcacctgcactgtct

SEQ ID NO: 1711 - DNA, 20 bp, synthetic construct
  misc_feature 1..20: note = synthetic sequence
  modified_base 11: mod_base = OTHER; note = uracil
  modified_base 18: mod_base = OTHER; note = uracil
  source 1..20: mol_type = other DNA
gtccctcacctgcgctatct

SEQ ID NO: 1712 - DNA, 20 bp, synthetic construct
  misc_feature 1..20: note = synthetic sequence
  modified_base 11: mod_base = OTHER; note = uracil
  modified_base 18: mod_base = OTHER; note = uracil
  source 1..20: mol_type = other DNA
gtccctcacctgcactgtca

SEQ ID NO: 1713 - DNA, 26 bp, synthetic construct
  misc_feature 1..26: note = synthetic sequence
  modified_base 12: mod_base = OTHER; note = uracil
  modified_base 25: mod_base = OTHER; note = uracil
  source 1..26: mol_type = other DNA
gtctctgaagatctcctgtaagggtt

SEQ ID NO: 1714 - DNA, 26 bp, synthetic construct
  misc_feature 1..26: note = synthetic sequence
  modified_base 12: mod_base = OTHER; note = uracil
  modified_base 25: mod_base = OTHER; note = uracil
  source 1..26: mol_type = other DNA
gtctctgaggatctcctgtaagggtt

SEQ ID NO: 1715 - DNA, 23 bp, synthetic construct
  misc_feature 1..23: note = synthetic sequence
  modified_base 9: mod_base = OTHER; note = uracil
  modified_base 21: mod_base = OTHER; note = uracil
  source 1..23: mol_type = other DNA
cctctcactcacctgtgccatct

SEQ ID NO: 1716 - DNA, 23 bp, synthetic construct
  misc_feature 1..23: note = synthetic sequence
  modified_base 11: mod_base = OTHER; note = uracil
  modified_base 22: mod_base = OTHER; note = uracil
  source 1..23: mol_type = other DNA
agtgaaggtttcctgcaaggctt

SEQ ID NO: 1717 - DNA, 21 bp, synthetic construct
  misc_feature 1..21: note = synthetic sequence
  modified_base 10: mod_base = OTHER; note = uracil
  modified_base 20: mod_base = OTHER; note = uracil
  source 1..21: mol_type = other DNA
gggctgaggtgaagaagcttg

SEQ ID NO: 1718 - DNA, 21 bp, synthetic construct
  misc_feature 1..21: note = synthetic sequence
  modified_base 10: mod_base = OTHER; note = uracil
  modified_base 20: mod_base = OTHER; note = uracil
  source 1..21: mol_type = other DNA
gagctgaggtgaagaagcctg

SEQ ID NO: 1719 - DNA, 21 bp, synthetic construct
  misc_feature 1..21: note = synthetic sequence
  modified_base 10: mod_base = OTHER; note = uracil
  modified_base 20: mod_base = OTHER; note = uracil
  source 1..21: mol_type = other DNA
ggtctgagttgaagaagcctg

SEQ ID NO: 1720 - DNA, 21 bp, synthetic construct
  misc_feature 1..21: note = synthetic sequence
  modified_base 10: mod_base = OTHER; note = uracil
  modified_base 20: mod_base = OTHER; note = uracil
  source 1..21: mol_type = other DNA
gggctgaggtgaagaagactg

SEQ ID NO: 1721 - DNA, 21 bp, synthetic construct
  misc_feature 1..21: note = synthetic sequence
  modified_base 10: mod_base = OTHER; note = uracil
  modified_base 20: mod_base = OTHER; note = uracil
  source 1..21: mol_type = other DNA
ggcctgaggtgaagaagcctg

SEQ ID NO: 1722 - DNA, 21 bp, synthetic construct
  misc_feature 1..21: note = synthetic sequence
  modified_base 10: mod_base = OTHER; note = uracil
  modified_base 20: mod_base = OTHER; note = uracil
  source 1..21: mol_type = other DNA
gggctgaggtgaagaagcctg

SEQ ID NO: 1723 - DNA, 22 bp, synthetic construct
  misc_feature 1..22: note = synthetic sequence
  modified_base 10: mod_base = OTHER; note = uracil
  modified_base 18: mod_base = OTHER; note = uracil
  source 1..22: mol_type = other DNA
gtctggtcctacgctggtaaaa

SEQ ID NO: 1724 - DNA, 22 bp, synthetic construct
  misc_feature 1..22: note = synthetic sequence
  modified_base 10: mod_base = OTHER; note = uracil
  modified_base 18: mod_base = OTHER; note = uracil
  source 1..22: mol_type = other DNA
gtctggtcctgcgctggtgaaa

SEQ ID NO: 1725 - DNA, 22 bp, synthetic construct
  misc_feature 1..22: note = synthetic sequence
  modified_base 10: mod_base = OTHER; note = uracil
  modified_base 18: mod_base = OTHER; note = uracil
  source 1..22: mol_type = other DNA
gtctggtcctgtgctggtgaaa

SEQ ID NO: 1726 - DNA, 22 bp, synthetic construct
  misc_feature 1..22: note = synthetic sequence
  modified_base 10: mod_base = OTHER; note = uracil
  modified_base 18: mod_base = OTHER; note = uracil
  source 1..22: mol_type = other DNA
gtctggtcctacgctggtgaaa

SEQ ID NO: 1727 - DNA, 21 bp, synthetic construct
  misc_feature 1..21: note = synthetic sequence
  modified_base 8: mod_base = OTHER; note = uracil
  modified_base 20: mod_base = OTHER; note = uracil
  source 1..21: mol_type = other DNA
ggtcccttagactctcctgtg

SEQ ID NO: 1728 - DNA, 21 bp, synthetic construct
  misc_feature 1..21: note = synthetic sequence
  modified_base 7: mod_base = OTHER; note = uracil
  modified_base 20: mod_base = OTHER; note = uracil
  source 1..21: mol_type = other DNA
ggtccctgagactctcctgta

SEQ ID NO: 1729 - DNA, 21 bp, synthetic construct
  misc_feature 1..21: note = synthetic sequence
  modified_base 7: mod_base = OTHER; note = uracil
  modified_base 20: mod_base = OTHER; note = uracil
  source 1..21: mol_type = other DNA
cgtccctgagactctcctgta

SEQ ID NO: 1730 - DNA, 21 bp, synthetic construct
  misc_feature 1..21: note = synthetic sequence
  modified_base 7: mod_base = OTHER; note = uracil
  modified_base 20: mod_base = OTHER; note = uracil
  source 1..21: mol_type = other DNA
ggtccctgaaactctcctgtg

SEQ ID NO: 1731 - DNA, 21 bp, synthetic construct
  misc_feature 1..21: note = synthetic sequence
  modified_base 7: mod_base = OTHER; note = uracil
  modified_base 20: mod_base = OTHER; note = uracil
  source 1..21: mol_type = other DNA
ggtccctgagactctcctttg

SEQ ID NO: 1732 - DNA, 21 bp, synthetic construct
  misc_feature 1..21: note = synthetic sequence
  modified_base 7: mod_base = OTHER; note = uracil
  modified_base 20: mod_base = OTHER; note = uracil
  source 1..21: mol_type = other DNA
gggccctgagactctcctgtg

SEQ ID NO: 1733 - DNA, 21 bp, synthetic construct
  misc_feature 1..21: note = synthetic sequence
  modified_base 7: mod_base = OTHER; note = uracil
  modified_base 20: mod_base = OTHER; note = uracil
  source 1..21: mol_type = other DNA
ggtccctgagactctcctgtt

SEQ ID NO: 1734 - DNA, 21 bp, synthetic construct
  misc_feature 1..21: note = synthetic sequence
  modified_base 7: mod_base = OTHER; note = uracil
  modified_base 20: mod_base = OTHER; note = uracil
  source 1..21: mol_type = other DNA
ggtccctgagactctcctgtg

SEQ ID NO: 1735 - DNA, 19 bp, synthetic construct
  misc_feature 1..19: note = synthetic sequence
  modified_base 12: mod_base = OTHER; note = uracil
  modified_base 15: mod_base = OTHER; note = uracil
  source 1..19: mol_type = other DNA
gggcgcaggactgttgaag

SEQ ID NO: 1736 - DNA, 19 bp, synthetic construct
  misc_feature 1..19: note = synthetic sequence
  modified_base 4: mod_base = OTHER; note = uracil
  modified_base 15: mod_base = OTHER; note = uracil
  source 1..19: mol_type = other DNA
aggtccaggactggtgaag

SEQ ID NO: 1737 - DNA, 19 bp, synthetic construct
  misc_feature 1..19: note = synthetic sequence
  modified_base 5: mod_base = OTHER; note = uracil
  modified_base 15: mod_base = OTHER; note = uracil
  source 1..19: mol_type = other DNA
cggctcaggactggtgaag

SEQ ID NO: 1738 - DNA, 19 bp, synthetic construct
  misc_feature 1..19: note = synthetic sequence
  modified_base 12: mod_base = OTHER; note = uracil
  modified_base 15: mod_base = OTHER; note = uracil
  source 1..19: mol_type = other DNA
gggcccaggactgttgaag

SEQ ID NO: 1739 - DNA, 19 bp, synthetic construct
  misc_feature 1..19: note = synthetic sequence
  modified_base 12: mod_base = OTHER; note = uracil
  modified_base 15: mod_base = OTHER; note = uracil
  source 1..19: mol_type = other DNA
gggcccaggactggtgaag

SEQ ID NO: 1740 - DNA, 19 bp, synthetic construct
  misc_feature 1..19: note = synthetic sequence
  modified_base 4: mod_base = OTHER; note = uracil
  modified_base 15: mod_base = OTHER; note = uracil
  source 1..19: mol_type = other DNA
aggtccgggactggtgaag

SEQ ID NO: 1741 - DNA, 22 bp, synthetic construct
  misc_feature 1..22: note = synthetic sequence
  modified_base 7: mod_base = OTHER; note = uracil
  modified_base 18: mod_base = OTHER; note = uracil
  source 1..22: mol_type = other DNA
gcagtctggagcagaggtgaaa

SEQ ID NO: 1742 - DNA, 22 bp, synthetic construct
  misc_feature 1..22: note = synthetic sequence
  modified_base 5: mod_base = OTHER; note = uracil
  modified_base 18: mod_base = OTHER; note = uracil
  source 1..22: mol_type = other DNA
gcagtccggagcagaggtgaaa

SEQ ID NO: 1743 - DNA, 21 bp, synthetic construct
  misc_feature 1..21: note = synthetic sequence
  modified_base 9: mod_base = OTHER; note = uracil
  modified_base 19: mod_base = OTHER; note = uracil
  source 1..21: mol_type = other DNA
ggctgaggtgaagaagcctgg

SEQ ID NO: 1744 - DNA, 21 bp, synthetic construct
  misc_feature 1..21: note = synthetic sequence
  modified_base 9: mod_base = OTHER; note = uracil
  modified_base 19: mod_base = OTHER; note = uracil
  source 1..21: mol_type = other DNA
agctgaggtgaagaagcctgg

SEQ ID NO: 1745 - DNA, 21 bp, synthetic construct
  misc_feature 1..21: note = synthetic sequence
  modified_base 9: mod_base = OTHER; note = uracil
  modified_base 19: mod_base = OTHER; note = uracil
  source 1..21: mol_type = other DNA
gcctgaggtgaagaagcctgg

SEQ ID NO: 1746 - DNA, 21 bp, synthetic construct
  misc_feature 1..21: note = synthetic sequence
  modified_base 9: mod_base = OTHER; note = uracil
  modified_base 19: mod_base = OTHER; note = uracil
  source 1..21: mol_type = other DNA
ggctgaggtgaagaagcttgg

SEQ ID NO: 1747 - DNA, 21 bp, synthetic construct
  misc_feature 1..21: note = synthetic sequence
  modified_base 9: mod_base = OTHER; note = uracil
  modified_base 19: mod_base = OTHER; note = uracil
  source 1..21: mol_type = other DNA
ggctgaggtgaagaagactgg

SEQ ID NO: 1748 - DNA, 21 bp, synthetic construct
  misc_feature 1..21: note = synthetic sequence
  modified_base 9: mod_base = OTHER; note = uracil
  modified_base 19: mod_base = OTHER; note = uracil
  source 1..21: mol_type = other DNA
gtctgagttgaagaagcctgg

SEQ ID NO: 1749 - DNA, 20 bp, synthetic construct
  misc_feature 1..20: note = synthetic sequence
  modified_base 5: mod_base = OTHER; note = uracil
  modified_base 13: mod_base = OTHER; note = uracil
  source 1..20: mol_type = other DNA
gtcctacgctggtgaaaccc

SEQ ID NO: 1750 - DNA, 20 bp, synthetic construct
  misc_feature 1..20: note = synthetic sequence
  modified_base 7: mod_base = OTHER; note = uracil
  modified_base 13: mod_base = OTHER; note = uracil
  source 1..20: mol_type = other DNA
gtcctgtgctggtgaaaccc

SEQ ID NO: 1751 - DNA, 20 bp, synthetic construct
  misc_feature 1..20: note = synthetic sequence
  modified_base 5: mod_base = OTHER; note = uracil
  modified_base 13: mod_base = OTHER; note = uracil
  source 1..20: mol_type = other DNA
gtcctgcgctggtgaaaccc

SEQ ID NO: 1752 - DNA, 20 bp, synthetic construct
  misc_feature 1..20: note = synthetic sequence
  modified_base 5: mod_base = OTHER; note = uracil
  modified_base 13: mod_base = OTHER; note = uracil
  source 1..20: mol_type = other DNA
gtcctacgctggtaaaaccc

SEQ ID NO: 1753 - DNA, 20 bp, synthetic construct
  misc_feature 1..20: note = synthetic sequence
  modified_base 10: mod_base = OTHER; note = uracil
  modified_base 13: mod_base = OTHER; note = uracil
  source 1..20: mol_type = other DNA
gtccaggactggtgaagccc

SEQ ID NO: 1754 - DNA, 20 bp, synthetic construct
  misc_feature 1..20: note = synthetic sequence
  modified_base 10: mod_base = OTHER; note = uracil
  modified_base 13: mod_base = OTHER; note = uracil
  source 1..20: mol_type = other DNA
gcccaggactgttgaagcct

SEQ ID NO: 1755 - DNA, 20 bp, synthetic construct
  misc_feature 1..20: note = synthetic sequence
  modified_base 10: mod_base = OTHER; note = uracil
  modified_base 13: mod_base = OTHER; note = uracil
  source 1..20: mol_type = other DNA
gtccgggactggtgaagccc

SEQ ID NO: 1756 - DNA, 20 bp, synthetic construct
  misc_feature 1..20: note = synthetic sequence
  modified_base 3: mod_base = OTHER; note = uracil
  modified_base 13: mod_base = OTHER; note = uracil
  source 1..20: mol_type = other DNA
gctcaggactggtgaagcct

SEQ ID NO: 1757 - DNA, 20 bp, synthetic construct
  misc_feature 1..20: note = synthetic sequence
  modified_base 10: mod_base = OTHER; note = uracil
  modified_base 13: mod_base = OTHER; note = uracil
  source 1..20: mol_type = other DNA
gcccaggactggtgaagcct

SEQ ID NO: 1758 - DNA, 20 bp, synthetic construct
  misc_feature 1..20: note = synthetic sequence
  modified_base 10: mod_base = OTHER; note = uracil
  modified_base 13: mod_base = OTHER; note = uracil
  source 1..20: mol_type = other DNA
gcgcaggactgttgaagcct

SEQ ID NO: 1759 - DNA, 23 bp, synthetic construct
  misc_feature 1..23: note = synthetic sequence
  modified_base 5: mod_base = OTHER; note = uracil
  modified_base 18: mod_base = OTHER; note = uracil
  source 1..23: mol_type = other DNA
gcagtccggagcagaggtgaaaa

SEQ ID NO: 1760 - DNA, 23 bp, synthetic construct
  misc_feature 1..23: note = synthetic sequence
  modified_base 7: mod_base = OTHER; note = uracil
  modified_base 18: mod_base = OTHER; note = uracil
  source 1..23: mol_type = other DNA
gcagtctggagcagaggtgaaaa

SEQ ID NO: 1761 - DNA, 22 bp, synthetic construct
  misc_feature 1..22: note = synthetic sequence
  modified_base 10: mod_base = OTHER; note = uracil
  modified_base 20: mod_base = OTHER; note = uracil
  source 1..22: mol_type = other DNA
ggtctgagttgaagaagcctgg

SEQ ID NO: 1762 - DNA, 22 bp, synthetic construct
  misc_feature 1..22: note = synthetic sequence
  modified_base 10: mod_base = OTHER; note = uracil
  modified_base 20: mod_base = OTHER; note = uracil
  source 1..22: mol_type = other DNA
ggcctgaggtgaagaagcctgg

SEQ ID NO: 1763 - DNA, 22 bp, synthetic construct
  misc_feature 1..22: note = synthetic sequence
  modified_base 10: mod_base = OTHER; note = uracil
  modified_base 20: mod_base = OTHER; note = uracil
  source 1..22: mol_type = other DNA
gggctgaggtgaagaagactgg

SEQ ID NO: 1764 - DNA, 22 bp, synthetic construct
  misc_feature 1..22: note = synthetic sequence
  modified_base 10: mod_base = OTHER; note = uracil
  modified_base 20: mod_base = OTHER; note = uracil
  source 1..22: mol_type = other DNA
gggctgaggtgaagaagcttgg

SEQ ID NO: 1765 - DNA, 22 bp, synthetic construct
  misc_feature 1..22: note = synthetic sequence
  modified_base 10: mod_base = OTHER; note = uracil
  modified_base 20: mod_base = OTHER; note = uracil
  source 1..22: mol_type = other DNA
gagctgaggtgaagaagcctgg

SEQ ID NO: 1766 - DNA, 22 bp, synthetic construct
  misc_feature 1..22: note = synthetic sequence
  modified_base 10: mod_base = OTHER; note = uracil
  modified_base 20: mod_base = OTHER; note = uracil
  source 1..22: mol_type = other DNA
gggctgaggtgaagaagcctgg

SEQ ID NO: 1767 - DNA, 20 bp, synthetic construct
  misc_feature 1..20: note = synthetic sequence
  modified_base 3: mod_base = OTHER; note = uracil
  modified_base 11: mod_base = OTHER; note = uracil
  source 1..20: mol_type = other DNA
cctgcgctggtgaaacccac

SEQ ID NO: 1768 - DNA, 20 bp, synthetic construct
  misc_feature 1..20: note = synthetic sequence
  modified_base 3: mod_base = OTHER; note = uracil
  modified_base 11: mod_base = OTHER; note = uracil
  source 1..20: mol_type = other DNA
cctgtgctggtgaaacccac

SEQ ID NO: 1769 - DNA, 20 bp, synthetic construct
  misc_feature 1..20: note = synthetic sequence
  modified_base 3: mod_base = OTHER; note = uracil
  modified_base 11: mod_base = OTHER; note = uracil
  source 1..20: mol_type = other DNA
cctacgctggtgaaacccac

SEQ ID NO: 1770 - DNA, 20 bp, synthetic construct
  misc_feature 1..20: note = synthetic sequence
  modified_base 3: mod_base = OTHER; note = uracil
  modified_base 11: mod_base = OTHER; note = uracil
  source 1..20: mol_type = other DNA
cctacgctggtaaaacccac

SEQ ID NO: 1771 - DNA, 22 bp, synthetic construct
  misc_feature 1..22: note = synthetic sequence
  modified_base 9: mod_base = OTHER; note = uracil
  modified_base 19: mod_base = OTHER; note = uracil
  source 1..22: mol_type = other DNA
ggctgaggtgaagaagcctggg

SEQ ID NO: 1772 - DNA, 22 bp, synthetic construct
  misc_feature 1..22: note = synthetic sequence
  modified_base 9: mod_base = OTHER; note = uracil
  modified_base 19: mod_base = OTHER; note = uracil
  source 1..22: mol_type = other DNA
gcctgaggtgaagaagcctggg

SEQ ID NO: 1773 - DNA, 22 bp, synthetic construct
  misc_feature 1..22: note = synthetic sequence
  modified_base 9: mod_base = OTHER; note = uracil
  modified_base 19: mod_base = OTHER; note = uracil
  source 1..22: mol_type = other DNA
ggctgaggtgaagaagcttggg

SEQ ID NO: 1774 - DNA, 22 bp, synthetic construct
  misc_feature 1..22: note = synthetic sequence
  modified_base 9: mod_base = OTHER; note = uracil
  modified_base 19: mod_base = OTHER; note = uracil
  source 1..22: mol_type = other DNA
agctgaggtgaagaagcctggg

SEQ ID NO: 1775 - DNA, 22 bp, synthetic construct
  misc_feature 1..22: note = synthetic sequence
  modified_base 9: mod_base = OTHER; note = uracil
  modified_base 19: mod_base = OTHER; note = uracil
  source 1..22: mol_type = other DNA
gtctgagttgaagaagcctggg

SEQ ID NO: 1776 - DNA, 22 bp, synthetic construct
  misc_feature 1..22: note = synthetic sequence
  modified_base 9: mod_base = OTHER; note = uracil
  modified_base 19: mod_base = OTHER; note = uracil
  source 1..22: mol_type = other DNA
ggctgaggtgaagaagactggg

SEQ ID NO: 1777 - DNA, 20 bp, synthetic construct
  misc_feature 1..20: note = synthetic sequence
  modified_base 6: mod_base = OTHER; note = uracil
  modified_base 9: mod_base = OTHER; note = uracil
  source 1..20: mol_type = other DNA
tgcgctggtgaaacccacac

SEQ ID NO: 1778 - DNA, 20 bp, synthetic construct
  misc_feature 1..20: note = synthetic sequence
  modified_base 6: mod_base = OTHER; note = uracil
  modified_base 9: mod_base = OTHER; note = uracil
  source 1..20: mol_type = other DNA
tacgctggtaaaacccacac

SEQ ID NO: 1779 - DNA, 20 bp, synthetic construct
  misc_feature 1..20: note = synthetic sequence
  modified_base 3: mod_base = OTHER; note = uracil
  modified_base 9: mod_base = OTHER; note = uracil
  source 1..20: mol_type = other DNA
tgtgctggtgaaacccacag

SEQ ID NO: 1780 - DNA, 20 bp, synthetic construct
  misc_feature 1..20: note = synthetic sequence
  modified_base 6: mod_base = OTHER; note = uracil
  modified_base 9: mod_base = OTHER; note = uracil
  source 1..20: mol_type = other DNA
tacgctggtgaaacccacac

SEQ ID NO: 1781 - DNA, 22 bp, synthetic construct
  misc_feature 1..22: note = synthetic sequence
  modified_base 8: mod_base = OTHER; note = uracil
  modified_base 19: mod_base = OTHER; note = uracil
  source 1..22: mol_type = other DNA
tcctcggtgaaggtctcctgca

SEQ ID NO: 1782 - DNA, 22 bp, synthetic construct
  misc_feature 1..22: note = synthetic sequence
  modified_base 8: mod_base = OTHER; note = uracil
  modified_base 19: mod_base = OTHER; note = uracil
  source 1..22: mol_type = other DNA
gcctcagtgaaggtctcctgca

SEQ ID NO: 1783 - DNA, 22 bp, synthetic construct
  misc_feature 1..22: note = synthetic sequence
  modified_base 8: mod_base = OTHER; note = uracil
  modified_base 19: mod_base = OTHER; note = uracil
  source 1..22: mol_type = other DNA
tcctcagtgaaggtctcctgca

SEQ ID NO: 1784 - DNA, 22 bp, synthetic construct
  misc_feature 1..22: note = synthetic sequence
  modified_base 8: mod_base = OTHER; note = uracil
  modified_base 19: mod_base = OTHER; note = uracil
  source 1..22: mol_type = other DNA
acctcagtgaaggtctcctgca

SEQ ID NO: 1785 - DNA, 22 bp, synthetic construct
  misc_feature 1..22: note = synthetic sequence
  modified_base 8: mod_base = OTHER; note = uracil
  modified_base 19: mod_base = OTHER; note = uracil
  source 1..22: mol_type = other DNA
gcctcagtgaaggtttcctgca

SEQ ID NO: 1786 - DNA, 22 bp, synthetic construct
  misc_feature 1..22: note = synthetic sequence
  modified_base 8: mod_base = OTHER; note = uracil
  modified_base 19: mod_base = OTHER; note = uracil
  source 1..22: mol_type = other DNA
tcctcagtgaaggtttcctgca

SEQ ID NO: 1787 - DNA, 22 bp, synthetic construct
  misc_feature 1..22: note = synthetic sequence
  modified_base 8: mod_base = OTHER; note = uracil
  modified_base 19: mod_base = OTHER; note = uracil
  source 1..22: mol_type = other DNA
gctacagtgaaaatctcctgca

SEQ ID NO: 1788 - DNA, 20 bp, synthetic construct
  misc_feature 1..20: note = synthetic sequence
  modified_base 8: mod_base = OTHER; note = uracil
  modified_base 19: mod_base = OTHER; note = uracil
  source 1..20: mol_type = other DNA
cagaccctcacactgacctg

SEQ ID NO: 1789 - DNA, 20 bp, synthetic construct
  misc_feature 1..20: note = synthetic sequence
  modified_base 8: mod_base = OTHER; note = uracil
  modified_base 19: mod_base = OTHER; note = uracil
  source 1..20: mol_type = other DNA
gagaccctcacgctgacctg

SEQ ID NO: 1790 - DNA, 20 bp, synthetic construct
  misc_feature 1..20: note = synthetic sequence
  modified_base 8: mod_base = OTHER; note = uracil
  modified_base 19: mod_base = OTHER; note = uracil
  source 1..20: mol_type = other DNA
cagaccctcacgctgacctg

SEQ ID NO: 1791 - DNA, 20 bp, synthetic construct
  misc_feature 1..20: note = synthetic sequence
  modified_base 8: mod_base = OTHER; note = uracil
  modified_base 14: mod_base = OTHER; note = uracil
  source 1..20: mol_type = other DNA
cagaccctcacgctgacccg

SEQ ID NO: 1792 - DNA, 20 bp, synthetic construct
  misc_feature 1..20: note = synthetic sequence
  modified_base 8: mod_base = OTHER; note = uracil
  modified_base 18: mod_base = OTHER; note = uracil
  source 1..20: mol_type = other DNA
ctgtccctcacctgtactgt

SEQ ID NO: 1793 - DNA, 20 bp, synthetic construct
  misc_feature 1..20: note = synthetic sequence
  modified_base 8: mod_base = OTHER; note = uracil
  modified_base 18: mod_base = OTHER; note = uracil
  source 1..20: mol_type = other DNA
ccgtccctcacctgcactgt

SEQ ID NO: 1794 - DNA, 20 bp, synthetic construct
  misc_feature 1..20: note = synthetic sequence
  modified_base 8: mod_base = OTHER; note = uracil
  modified_base 15: mod_base = OTHER; note = uracil
  source 1..20: mol_type = other DNA
ctctcactcacctgtgccat

SEQ ID NO: 1795 - DNA, 20 bp, synthetic construct
  misc_feature 1..20: note = synthetic sequence
  modified_base 8: mod_base = OTHER; note = uracil
  modified_base 18: mod_base = OTHER; note = uracil
  source 1..20: mol_type = other DNA
ctgtccctcacctgcactgt

SEQ ID NO: 1796 - DNA, 20 bp, synthetic construct
  misc_feature 1..20: note = synthetic sequence
  modified_base 8: mod_base = OTHER; note = uracil
  modified_base 18: mod_base = OTHER; note = uracil
  source 1..20: mol_type = other DNA
ctgtccctcacctgcgctat

SEQ ID NO: 1797 - DNA, 20 bp, synthetic construct
  misc_feature 1..20: note = synthetic sequence
  modified_base 8: mod_base = OTHER; note = uracil
  modified_base 18: mod_base = OTHER; note = uracil
  source 1..20: mol_type = other DNA
ctgtccctcacctgcgctgt

SEQ ID NO: 1798 - DNA, 24 bp, synthetic construct
  misc_feature 1..24: note = synthetic sequence
  modified_base 10: mod_base = OTHER; note = uracil
  modified_base 23: mod_base = OTHER; note = uracil
  source 1..24: mol_type = other DNA
gggagtctctgaggatctcctgta

SEQ ID NO: 1799 - DNA, 24 bp, synthetic construct
  misc_feature 1..24: note = synthetic sequence
  modified_base 10: mod_base = OTHER; note = uracil
  modified_base 23: mod_base = OTHER; note = uracil
  source 1..24: mol_type = other DNA
gggagtctctgaagatctcctgta

SEQ ID NO: 1800 - DNA, 22 bp, synthetic construct
  misc_feature 1..22: note = synthetic sequence
  modified_base 5: mod_base = OTHER; note = uracil
  modified_base 16: mod_base = OTHER; note = uracil
  source 1..22: mol_type = other DNA
tcggtgaaggtctcctgcaagg

SEQ ID NO: 1801 - DNA, 22 bp, synthetic construct
  misc_feature 1..22: note = synthetic sequence
  modified_base 5: mod_base = OTHER; note = uracil
  modified_base 16: mod_base = OTHER; note = uracil
  source 1..22: mol_type = other DNA
tcagtgaaggtttcctgcaagg

SEQ ID NO: 1802 - DNA, 22 bp, synthetic construct
  misc_feature 1..22: note = synthetic sequence
  modified_base 11: mod_base = OTHER; note = uracil
  modified_base 16: mod_base = OTHER; note = uracil
  source 1..22: mol_type = other DNA
acagtgaaaatctcctgcaagg

SEQ ID NO: 1803 - DNA, 22 bp, synthetic construct
  misc_feature 1..22: note = synthetic sequence
  modified_base 11: mod_base = OTHER; note = uracil
  modified_base 16: mod_base = OTHER; note = uracil
  source 1..22: mol_type = other DNA
tcagtgaaggtctcctgcaagg

SEQ ID NO: 1804 - DNA, 19 bp, synthetic construct
  misc_feature 1..19: note = synthetic sequence
  modified_base 7: mod_base = OTHER; note = uracil
  modified_base 12: mod_base = OTHER; note = uracil
  source 1..19: mol_type = other DNA
tcacgctgacctgcaccgt

SEQ ID NO: 1805 - DNA, 19 bp, synthetic construct
  misc_feature 1..19: note = synthetic sequence
  modified_base 7: mod_base = OTHER; note = uracil
  modified_base 18: mod_base = OTHER; note = uracil
  source 1..19: mol_type = other DNA
tcacgctgacccgcacctt

SEQ ID NO: 1806 - DNA, 19 bp, synthetic construct
  misc_feature 1..19: note = synthetic sequence
  modified_base 12: mod_base = OTHER; note = uracil
  modified_base 18: mod_base = OTHER; note = uracil
  source 1..19: mol_type = other DNA
tcacactgacctgcgcctt

SEQ ID NO: 1807 - DNA, 19 bp, synthetic construct
  misc_feature 1..19: note = synthetic sequence
  modified_base 7: mod_base = OTHER; note = uracil
  modified_base 18: mod_base = OTHER; note = uracil
  source 1..19: mol_type = other DNA
tcacactgacctgcacctt

SEQ ID NO: 1808 - DNA, 19 bp, synthetic construct
  misc_feature 1..19: note = synthetic sequence
  modified_base 7: mod_base = OTHER; note = uracil
  modified_base 18: mod_base = OTHER; note = uracil
  source 1..19: mol_type = other DNA
tcacgctgacctgcacctt

SEQ ID NO: 1809 - DNA, 22 bp, synthetic construct
  misc_feature 1..22: note = synthetic sequence
  modified_base 10: mod_base = OTHER; note = uracil
  modified_base 17: mod_base = OTHER; note = uracil
  source 1..22: mol_type = other DNA
ccctgagactctcctgtacagc

SEQ ID NO: 1810 - DNA, 22 bp, synthetic construct
  misc_feature 1..22: note = synthetic sequence
  modified_base 10: mod_base = OTHER; note = uracil
  modified_base 18: mod_base = OTHER; note = uracil
  source 1..22: mol_type = other DNA
ccctgagactctcctgttcagc

SEQ ID NO: 1811 - DNA, 22 bp, synthetic construct
  misc_feature 1..22: note = synthetic sequence
  modified_base 10: mod_base = OTHER; note = uracil
  modified_base 17: mod_base = OTHER; note = uracil
  source 1..22: mol_type = other DNA
ccctgagactctcctttgcagc

SEQ ID NO: 1812 - DNA, 22 bp, synthetic construct
  misc_feature 1..22: note = synthetic sequence
  modified_base 10: mod_base = OTHER; note = uracil
  modified_base 17: mod_base = OTHER; note = uracil
  source 1..22: mol_type = other DNA
ccctgaaactctcctgtgcagc

SEQ ID NO: 1813 - DNA, 22 bp, synthetic construct
  misc_feature 1..22: note = synthetic sequence
  modified_base 10: mod_base = OTHER; note = uracil
  modified_base 17: mod_base = OTHER; note = uracil
  source 1..22: mol_type = other DNA
ccctgagactctcctgtgcagc

SEQ ID NO: 1814 - DNA, 22 bp, synthetic construct
  misc_feature 1..22: note = synthetic sequence
  modified_base 10: mod_base = OTHER; note = uracil
  modified_base 17: mod_base = OTHER; note = uracil
  source 1..22: mol_type = other DNA
cccttagactctcctgtgcagc

SEQ ID NO: 1815 - DNA, 26 bp, synthetic construct
  misc_feature 1..26: note = synthetic sequence
  modified_base 8: mod_base = OTHER; note = uracil
  modified_base 21: mod_base = OTHER; note = uracil
  source 1..26: mol_type = other DNA
gagtctctgaagatctcctgtaaggg

SEQ ID NO: 1816 - DNA, 26 bp, synthetic construct
  misc_feature 1..26: note = synthetic sequence
  modified_base 8: mod_base = OTHER; note = uracil
  modified_base 21: mod_base = OTHER; note = uracil
  source 1..26: mol_type = other DNA
gagtctctgaggatctcctgtaaggg

SEQ ID NO: 1817 - DNA, 24 bp, synthetic construct
  misc_feature 1..24: note = synthetic sequence
  modified_base 10: mod_base = OTHER; note = uracil
  modified_base 22: mod_base = OTHER; note = uracil
  source 1..24: mol_type = other DNA
gtgaaggtctcctgcaaggcttct

SEQ ID NO: 1818 - DNA, 24 bp, synthetic construct
  misc_feature 1..24: note = synthetic sequence
  modified_base 10: mod_base = OTHER; note = uracil
  modified_base 22: mod_base = OTHER; note = uracil
  source 1..24: mol_type = other DNA
gtgaaaatctcctgcaaggtttct

SEQ ID NO: 1819 - DNA, 24 bp, synthetic construct
  misc_feature 1..24: note = synthetic sequence
  modified_base 10: mod_base = OTHER; note = uracil
  modified_base 22: mod_base = OTHER; note = uracil
  source 1..24: mol_type = other DNA
gtgaaggtttcctgcaaggcatct

SEQ ID NO: 1820 - DNA, 24 bp, synthetic construct
  misc_feature 1..24: note = synthetic sequence
  modified_base 10: mod_base = OTHER; note = uracil
  modified_base 22: mod_base = OTHER; note = uracil
  source 1..24: mol_type = other DNA
gtgaaggtttcctgcaaggcttct

SEQ ID NO: 1821 - DNA, 24 bp, synthetic construct
  misc_feature 1..24: note = synthetic sequence
  modified_base 10: mod_base = OTHER; note = uracil
  modified_base 22: mod_base = OTHER; note = uracil
  source 1..24: mol_type = other DNA
gtgaaggtttcctgcaaggcttcc

SEQ ID NO: 1822 - DNA, 24 bp, synthetic construct
  misc_feature 1..24: note = synthetic sequence
  modified_base 10: mod_base = OTHER; note = uracil
  modified_base 22: mod_base = OTHER; note = uracil
  source 1..24: mol_type = other DNA
gtgaaggtctcctgcaaggtttcc

SEQ ID NO: 1823 - DNA, 20 bp, synthetic construct
  misc_feature 1..20: note = synthetic sequence
  modified_base 5: mod_base = OTHER; note = uracil
  modified_base 19: mod_base = OTHER; note = uracil
  source 1..20: mol_type = other DNA
acgctgacccgcaccttctc

SEQ ID NO: 1824 - DNA, 20 bp, synthetic construct
  misc_feature 1..20: note = synthetic sequence
  modified_base 10: mod_base = OTHER; note = uracil
  modified_base 19: mod_base = OTHER; note = uracil
  source 1..20: mol_type = other DNA
acgctgacctgcaccttctc

SEQ ID NO: 1825 - DNA, 20 bp, synthetic construct
  misc_feature 1..20: note = synthetic sequence
  modified_base 10: mod_base = OTHER; note = uracil
  modified_base 19: mod_base = OTHER; note = uracil
  source 1..20: mol_type = other DNA
acgctgacctgcaccgtctc

SEQ ID NO: 1826 - DNA, 20 bp, synthetic construct
  misc_feature 1..20: note = synthetic sequence
  modified_base 10: mod_base = OTHER; note = uracil
  modified_base 19: mod_base = OTHER; note = uracil
  source 1..20: mol_type = other DNA
acactgacctgcgccttctc

SEQ ID NO: 1827 - DNA, 20 bp, synthetic construct
  misc_feature 1..20: note = synthetic sequence
  modified_base 10: mod_base = OTHER; note = uracil
  modified_base 19: mod_base = OTHER; note = uracil
  source 1..20: mol_type = other DNA
acactgacctgcaccttctc

SEQ ID NO: 1828 - DNA, 21 bp, synthetic construct
  misc_feature 1..21: note = synthetic sequence
  modified_base 11: mod_base = OTHER; note = uracil
  modified_base 20: mod_base = OTHER; note = uracil
  source 1..21: mol_type = other DNA
gtccctcacctgcactgtctc

SEQ ID NO: 1829 - DNA, 21 bp, synthetic construct
  misc_feature 1..21: note = synthetic sequence
  modified_base 11: mod_base = OTHER; note = uracil
  modified_base 20: mod_base = OTHER; note = uracil
  source 1..21: mol_type = other DNA
gtccctcacctgtactgtctc

SEQ ID NO: 1830 - DNA, 21 bp, synthetic construct
  misc_feature 1..21: note = synthetic sequence
  modified_base 11: mod_base = OTHER; note = uracil
  modified_base 20: mod_base = OTHER; note = uracil
  source 1..21: mol_type = other DNA
gtccctcacctgcgctatctc

SEQ ID NO: 1831 - DNA, 21 bp, synthetic construct
  misc_feature 1..21: note = synthetic sequence
  modified_base 11: mod_base = OTHER; note = uracil
  modified_base 18: mod_base = OTHER; note = uracil
  source 1..21: mol_type = other DNA
gtccctcacctgcactgtcac

SEQ ID NO: 1832 - DNA, 21 bp, synthetic construct
  misc_feature 1..21: note = synthetic sequence
  modified_base 11: mod_base = OTHER; note = uracil
  modified_base 20: mod_base = OTHER; note = uracil
  source 1..21: mol_type = other DNA
ctcactcacctgtgccatctc

SEQ ID NO: 1833 - DNA, 21 bp, synthetic construct
  misc_feature 1..21: note = synthetic sequence
  modified_base 11: mod_base = OTHER; note = uracil
  modified_base 20: mod_base = OTHER; note = uracil
  source 1..21: mol_type = other DNA
gtccctcacctgcgctgtcta

SEQ ID NO: 1834 - DNA, 21 bp, synthetic construct
  misc_feature 1..21: note = synthetic sequence
  modified_base 11: mod_base = OTHER; note = uracil
  modified_base 20: mod_base = OTHER; note = uracil
  source 1..21: mol_type = other DNA
gtccctcacctgcgctgtctc

SEQ ID NO: 1835 - DNA, 27 bp, synthetic construct
  misc_feature 1..27: note = synthetic sequence
  modified_base 12: mod_base = OTHER; note = uracil
  modified_base 26: mod_base = OTHER; note = uracil
  source 1..27: mol_type = other DNA
gtctctgaggatctcctgtaagggttc

SEQ ID NO: 1836 - DNA, 27 bp, synthetic construct
  misc_feature 1..27: note = synthetic sequence
  modified_base 14: mod_base = OTHER; note = uracil
  modified_base 26: mod_base = OTHER; note = uracil
  source 1..27: mol_type = other DNA
gtctctgaagatctcctgtaagggttc

SEQ ID NO: 1837 - DNA, 23 bp, synthetic construct
  misc_feature 1..23: note = synthetic sequence
  modified_base 11: mod_base = OTHER; note = uracil
  modified_base 22: mod_base = OTHER; note = uracil
  source 1..23: mol_type = other DNA
agtgaaggtctcctgcaaggttt

SEQ ID NO: 1838 - DNA, 23 bp, synthetic construct
  misc_feature 1..23: note = synthetic sequence
  source 1..23: mol_type = other DNA
  modified_base 11: mod_base = OTHER; note = uracil
  modified_base 22: mod_base = OTHER; note = uracil
agtgaaggtttcctgcaaggctt
